(19) United States
(12) Patent Application Publication
(10) Pub. No.: US 2025/0122497 A1
(43) Pub. Date: Apr. 17, 2025

(54) MATERIALS AND METHODS FOR TREATMENT OF USHER SYNDROME TYPE 2A AND/OR NON-SYNDROMIC AUTOSOMAL RECESSIVE RETINITIS PIGMENTOSA (ARRP)

(71) Applicants: CRISPR THERAPEUTICS AG, Zug (CH); BAYER HEALTHCARE LLC, Whippany, NJ (US)

(72) Inventors: Mariacarmela Allocca, Cambridge, MA (US); Akiko Noma, Cambridge, MA (US); Abraham Scaria, Cambridge, MA (US)

(21) Appl. No.: 18/923,341

(22) Filed: Oct. 22, 2024

Related U.S. Application Data
(63) Continuation of application No. 17/391,862, filed on Aug. 2, 2021, now Pat. No. 12,122,998.
Application No. 17/391,862 is a continuation of application No. 16/905,258, filed on Jun. 18, 2020, now Pat. No. 11,118,177.
Application No. 16/905,258 is a continuation of application No. PCT/IB2018/060547, filed on Dec. 21, 2018.
(60) Provisional application No. 62/609,334, filed on Dec. 21, 2017.

(51) Int. Cl. C12N 15/11; A61K 35/12; A61K 38/00; A61K 48/00; A61P 27/02; C12N 9/22; C12N 15/86

(52) U.S. Cl. CPC C12N 15/11; A61K 35/12; A61K 48/0066; A61P 27/02; C12N 9/22; C12N 15/86; A61K 38/00; C12N 2310/20; C12N 2750/14132; C12N 2750/14143; C12N 2800/80

(57) ABSTRACT

The present application provides materials and methods for treating a patient with one or more of Usher Syndrome Type 2A and ARRP, both ex vivo and in vivo; materials and methods for editing an USH2A gene containing a guanine deletion at nucleotide position c.2299. In addition, the present application provides one or more gRNAs or sgRNAs for editing an USH2A gene containing a guanine deletion at nucleotide position c.2299; a therapeutic comprising at least one or more gRNAs or sgRNAs for editing an USH2A gene containing a guanine deletion at nucleotide position c.2299; and a therapeutic for treating a patient with one or more of Usher Syndrome Type 2A and ARRP. The present application also provides a kit for treating a patient with one or more of Usher Syndrome Type 2A and ARRP.

### RELATED APPLICATIONS

[0001] This application is a continuation of U.S. patent application Ser. No. 17/391,862, filed Aug. 2, 2021, now U.S. Pat. No. 12,122,998, which is a continuation of U.S. patent application Ser. No. 16/905,258, filed Jun. 18, 2020, now U.S. Pat. No. 11,118,177, which is a continuation of International Application No. PCT/IB2018/060547, filed Dec. 21, 2018, which claims the benefit of U.S. Provisional Application No. 62/609,334 filed Dec. 21, 2017. The entire contents of these applications are incorporated herein by reference in their entirety.

### INCORPORATION BY REFERENCE OF SEQUENCE LISTING

[0002] The text of the computer readable sequence listing filed herewith, titled “CRISP_42649_304_Corrected_SequenceListing.xml” created Dec. 31, 2024, having a file size of 7,304,138 bytes, is hereby incorporated by reference in its entirety.

### FIELD

[0003] The present application provides materials and methods for treating Usher Syndrome Type 2A and/or non-syndromic autosomal recessive Retinitis Pigmentosa (ARRP).

### BACKGROUND

[0004] Usher syndrome is a condition that affects both hearing and vision. The major symptoms of Usher syndrome are hearing loss and an eye disorder called retinitis pigmentosa (RP), which causes night-blindness and a loss of peripheral vision through the progressive degeneration of the retina. Many people with Usher syndrome also have severe balance problems.

[0005] RP refers to a group of inherited disorders in which abnormalities of the photoreceptors (rods and cones) of the retina lead to progressive visual loss. RP is classified as nonsyndromic, or “simple” (not affecting other organs or tissues); syndromic (affecting other neurosensory systems such as hearing); or systemic (affecting multiple tissues).

[0006] There are currently no adequate treatments for Usher Syndrome or non-syndromic autosomal recessive Retinitis Pigmentosa (ARRP) that can efficiently halt or slow the progression of the visual loss associated with the diseases and there still remains a critical need for developing safe and effective treatments for Usher Syndrome and ARRP.

### SUMMARY

[0007] The present disclosure presents a novel method to ameliorate, if not eliminate, Usher Syndrome Type 2A and/or ARRP. The novel approach targets a deletion of a guanine residue at nucleotide position c.2299 (c.2299delG) located in exon 13 of the USH2A gene with a method resulting in the excision of the c.2299delG. Furthermore, in some cases, the treatment can be effected with a small number of treatments and, in some cases, with a single treatment. The resulting therapy can ameliorate Usher Syndrome Type 2A and/or ARRP associated with c.2299delG, or in some cases, can eliminate Usher Syndrome Type 2A and/or ARRP associated with c.2299delG.

[0008] Provided herein is a method for editing an USH2A gene containing a guanine deletion at nucleotide position c.2299. The method comprises: introducing into a human cell one or more deoxyribonucleic acid (DNA) endonuclease, thereby effecting one or more single-strand breaks (SSBs) or double-strand breaks (DSBs) within or near one or more of: intron 12-13, exon 13, and intron 13-14 of the USH2A gene. The one or more SSBs or DSBs result in a correction thereby creating an edited human cell.

[0009] Also provided herein is an in vivo method for treating a patient with one or more of Usher Syndrome Type 2A and ARRP. The method comprises: editing an USH2A gene containing a guanine deletion at nucleotide position c.2299 in a cell of the patient.

[0010] Provided herein is a method for editing an USH2A gene containing a guanine deletion at nucleotide position c.2299. The method comprises: introducing into a human cell one or more DNA endonuclease, thereby effecting one or more SSBs or DSBs within or near one or more of intron 12-13, exon 13, and intron 13-14 of the USH2A gene. The one or more SSBs or DSBs result in a modulation of expression or function of the USH2A gene thereby creating an edited human cell.

[0011] Provided herein is a method for editing an USH2A gene containing a guanine deletion at nucleotide position c.2299. The method comprises: introducing into a human cell one or more DNA endonuclease thereby effecting one or more SSBs or DSBs within or near one or more of: intron 12-13, exon 13, and intron 13-14 of the USH2A gene. The one or more SSBs or DSBs result in a correction thereby creating an edited human cell.

[0012] Also provided herein is one or more guide ribonucleic acids (gRNAs) for editing an USH2A gene containing a guanine deletion at nucleotide position c.2299 in a cell from a patient with one or more of Usher Syndrome Type 2A and ARRP. The one or more gRNAs comprise a spacer sequence selected from the group consisting of nucleic acid sequences in SEQ ID NOs: 5272-5314 of the Sequence Listing.

[0013] Also provided herein is a therapeutic for treating a patient with one or more of Usher Syndrome Type 2A and ARRP, the therapeutic comprising at least one or more gRNAs for editing an USH2A gene containing a guanine deletion at nucleotide position c.2299. The one or more gRNAs comprise a spacer sequence selected from the group consisting of nucleic acid sequences in SEQ ID NOs: 5272-5314 of the Sequence Listing.

[0014] Also provided herein is a therapeutic for treating a patient with one or more of Usher Syndrome Type 2A and ARRP. The therapeutic is formed by a method comprising: introducing one or more DNA endonuclease; introducing one or more gRNA or one or more sgRNA for editing an USH2A gene containing a guanine deletion at nucleotide position c.2299; and optionally introducing one or more donor template. The one or more gRNAs or sgRNAs comprise a spacer sequence selected from the group consisting of nucleic acid sequences in SEQ ID NOs: 5272-5314 of the Sequence Listing.

[0015] Also provided herein is a kit for treating a patient with one or more of Usher Syndrome Type 2A and ARRP in vivo. The kit comprises: one or more gRNAs or sgRNAs for editing an USH2A gene containing a guanine deletion at nucleotide position c.2299, one or more DNA endonucleases, and optionally, one or more donor template. The one or more gRNAs or sgRNAs comprise a spacer sequence selected from the group consisting of nucleic acid sequences in SEQ ID NOs: 5272-5314 of the Sequence Listing.

[0016] Also provided herein is a method for editing an USH2A gene containing a guanine deletion at nucleotide position c.2299. The method comprises: deleting a sequence comprising the guanine deletion at nucleotide position c.2299 of the USH2A gene in a cell using a first gRNA or sgRNA comprising SEQ ID NO: 5295 and a second gRNA or sgRNA comprising SEQ ID NO: 5313.

[0017] Also provided herein is a method for treating a patient with an USH2A gene containing a guanine deletion at nucleotide position c.2299. The method comprises: administering a first gRNA or sgRNA and second gRNA or sgRNA to the patient, wherein the first gRNA or sgRNA comprises SEQ ID NO: 5295 and the second gRNA or sgRNA comprises SEQ ID NO: 5313.

[0018] Also provided herein is a method for editing an USH2A gene containing a guanine deletion at nucleotide position c.2299. The method comprises: deleting a sequence comprising the guanine deletion at nucleotide position c.2299 of the USH2A gene in a cell using a first gRNA or sgRNA comprising SEQ ID NO: 5295 and a second gRNA or sgRNA comprising SEQ ID NO: 5314.

[0019] Also provided herein is a method for treating a patient with an USH2A gene containing a guanine deletion at nucleotide position c.2299. The method comprises: administering a first gRNA or sgRNA and second gRNA or sgRNA to the patient, wherein the first gRNA or sgRNA comprises SEQ ID NO: 5295 and the second gRNA or sgRNA comprises SEQ ID NO: 5314.

[0020] Also provided herein is a method for editing an USH2A gene containing a guanine deletion at nucleotide position c.2299. The method comprises: deleting a sequence comprising the guanine deletion at nucleotide position c.2299 of the USH2A gene in a cell using a first gRNA or sgRNA comprising SEQ ID NO: 5299 and a second gRNA or sgRNA comprising SEQ ID NO: 5313.

[0021] Also provided herein is a method for treating a patient with an USH2A gene containing a guanine deletion at nucleotide position c.2299. The method comprises: administering a first gRNA or sgRNA and second gRNA or sgRNA to the patient, wherein the first gRNA or sgRNA comprises SEQ ID NO: 5299 and the second gRNA or sgRNA comprises SEQ ID NO: 5313.

[0022] Also provided herein is a method for editing an USH2A gene containing a guanine deletion at nucleotide position c.2299. The method comprises: deleting a sequence comprising the guanine deletion at nucleotide position c.2299 of the USH2A gene in a cell using a first gRNA or sgRNA comprising SEQ ID NO: 5299 and a second gRNA or sgRNA comprising SEQ ID NO: 5314.

[0023] Also provided herein is a method for treating a patient with an USH2A gene containing a guanine deletion at nucleotide position c.2299, the method comprising: administering a first gRNA or sgRNA and second gRNA or sgRNA to the patient, wherein the first gRNA or sgRNA comprises SEQ ID NO: 5299 and the second gRNA or sgRNA comprises SEQ ID NO: 5314.

[0024] Also provided herein is a method for editing an USH2A gene containing a guanine deletion at nucleotide position c.2299, the method comprising: deleting a sequence comprising the guanine deletion at nucleotide position c.2299 of the USH2A gene in a cell using a first gRNA or sgRNA comprising SEQ ID NO: 5295 and a second gRNA or sgRNA comprising SEQ ID NO: 5276.

[0025] Also provided herein is a method for treating a patient with an USH2A gene containing a guanine deletion at nucleotide position c.2299. The method comprises: administering a first gRNA or sgRNA and second gRNA or sgRNA to the patient, wherein the first gRNA or sgRNA comprises SEQ ID NO: 5295 and the second gRNA or sgRNA comprises SEQ ID NO: 5276.

[0026] Also provided herein is a method for editing an USH2A gene containing a guanine deletion at nucleotide position c.2299, the method comprising: deleting a sequence comprising the guanine deletion at nucleotide position c.2299 of the USH2A gene in a cell using a first gRNA or sgRNA comprising SEQ ID NO: 5295 and a second gRNA or sgRNA comprising SEQ ID NO: 5275.

[0027] Also provided herein is a method for treating a patient with an USH2A gene containing a guanine deletion at nucleotide position c.2299. The method comprises: administering a first gRNA or sgRNA and second gRNA or sgRNA to the patient, wherein the first gRNA or sgRNA comprises SEQ ID NO: 5295 and the second gRNA or sgRNA comprises SEQ ID NO: 5275.

[0028] Also provided herein is a method for editing an USH2A gene containing a guanine deletion at nucleotide position c.2299. The method comprises: deleting a sequence comprising the guanine deletion at nucleotide position c.2299 of the USH2A gene in a cell using a first gRNA or sgRNA comprising SEQ ID NO: 5295 and a second gRNA or sgRNA comprising SEQ ID NO: 5277.

[0029] Also provided herein is a method for treating a patient with an USH2A gene containing a guanine deletion at nucleotide position c.2299. The method comprises: administering a first gRNA or sgRNA and second gRNA or sgRNA to the patient, wherein the first gRNA or sgRNA comprises SEQ ID NO: 5295 and the second gRNA or sgRNA comprises SEQ ID NO: 5277.

[0030] Also provided herein is a method for editing an USH2A gene containing a guanine deletion at nucleotide position c.2299. The method comprises: deleting a sequence comprising the guanine deletion at nucleotide position c.2299 of the USH2A gene in a cell using a first gRNA or sgRNA comprising SEQ ID NO: 5295 and a second gRNA or sgRNA comprising SEQ ID NO: 5278.

[0031] Also provided herein is a method for treating a patient with an USH2A gene containing a guanine deletion at nucleotide position c.2299. The method comprises: administering a first gRNA or sgRNA and second gRNA or sgRNA to the patient, wherein the first gRNA or sgRNA comprises SEQ ID NO: 5295 and the second gRNA or sgRNA comprises SEQ ID NO: 5278.

[0032] Also provided herein is a method for editing an USH2A gene containing a guanine deletion at nucleotide position c.2299. The method comprises: deleting a sequence comprising the guanine deletion at nucleotide position c.2299 of the USH2A gene in a cell using a first gRNA or sgRNA comprising SEQ ID NO: 5295 and a second gRNA or sgRNA comprising SEQ ID NO: 5287.

[0033] Also provided herein is a method for treating a patient with an USH2A gene containing a guanine deletion at nucleotide position c.2299. The method comprises: administering a first gRNA or sgRNA and second gRNA or sgRNA to the patient, wherein the first gRNA or sgRNA comprises SEQ ID NO: 5295 and the second gRNA or sgRNA comprises SEQ ID NO: 5287.

[0034] Also provided herein is a method for editing an USH2A gene containing a guanine deletion at nucleotide position c.2299. The method comprises: deleting a sequence comprising the guanine deletion at nucleotide position c.2299 of the USH2A gene in a cell using a first gRNA or sgRNA comprising SEQ ID NO: 5295 and a second gRNA or sgRNA comprising SEQ ID NO: 5286.

[0035] Also provided herein is a method for treating a patient with an USH2A gene containing a guanine deletion at nucleotide position c.2299. The method comprises: administering a first gRNA or sgRNA and second gRNA or sgRNA to the patient, wherein the first gRNA or sgRNA comprises SEQ ID NO: 5295 and the second gRNA or sgRNA comprises SEQ ID NO: 5286.

[0036] Also provided herein is a method for editing an USH2A gene containing a guanine deletion at nucleotide position c.2299. The method comprises: deleting a sequence comprising the guanine deletion at nucleotide position c.2299 of the USH2A gene in a cell using a first gRNA or sgRNA comprising SEQ ID NO: 5295 and a second gRNA or sgRNA comprising SEQ ID NO: 5290.

[0037] Also provided herein is a method for treating a patient with an USH2A gene containing a guanine deletion at nucleotide position c.2299. The method comprises: administering a first gRNA or sgRNA and second gRNA or sgRNA to the patient, wherein the first gRNA or sgRNA comprises SEQ ID NO: 5295 and the second gRNA or sgRNA comprises SEQ ID NO: 5290.

[0038] Also provided herein is a method for editing an USH2A gene containing a guanine deletion at nucleotide position c.2299. The method comprises: deleting a sequence comprising the guanine deletion at nucleotide position c.2299 of the USH2A gene in a cell using a first gRNA or sgRNA comprising SEQ ID NO: 5295 and a second gRNA or sgRNA comprising SEQ ID NO: 5291.

[0039] Also provided herein is a method for treating a patient with an USH2A gene containing a guanine deletion at nucleotide position c.2299. The method comprises: administering a first gRNA or sgRNA and second gRNA or sgRNA to the patient, wherein the first gRNA or sgRNA comprises SEQ ID NO: 5295 and the second gRNA or sgRNA comprises SEQ ID NO: 5291.

[0040] Also provided herein is a method for editing an USH2A gene containing a guanine deletion at nucleotide position c.2299. The method comprises: deleting a sequence comprising the guanine deletion at nucleotide position c.2299 of the USH2A gene in a cell using a first gRNA or sgRNA comprising SEQ ID NO: 5295 and a second gRNA or sgRNA comprising SEQ ID NO: 5292.

[0041] Also provided herein is a method for treating a patient with an USH2A gene containing a guanine deletion at nucleotide position c.2299. The method comprises: administering a first gRNA or sgRNA and second gRNA or sgRNA to the patient, wherein the first gRNA or sgRNA comprises SEQ ID NO: 5295 and the second gRNA or sgRNA comprises SEQ ID NO: 5292.

[0042] Also provided herein is a method for editing an USH2A gene containing a guanine deletion at nucleotide position c.2299. The method comprises: deleting a sequence comprising the guanine deletion at nucleotide position c.2299 of the USH2A gene in a cell using a first gRNA or sgRNA comprising SEQ ID NO: 5295 and a second gRNA or sgRNA comprising SEQ ID NO: 5294.

[0043] Also provided herein is a method for treating a patient with an USH2A gene containing a guanine deletion at nucleotide position c.2299. The method comprises: administering a first gRNA or sgRNA and second gRNA or sgRNA to the patient, wherein the first gRNA or sgRNA comprises SEQ ID NO: 5295 and the second gRNA or sgRNA comprises SEQ ID NO: 5294.

[0044] Also provided herein is a method for editing an USH2A gene containing a guanine deletion at nucleotide position c.2299. The method comprises: deleting a sequence comprising the guanine deletion at nucleotide position c.2299 of the USH2A gene in a cell using a first gRNA or sgRNA comprising SEQ ID NO: 5295 and a second gRNA or sgRNA comprising SEQ ID NO: 5296.

[0045] Also provided herein is method for treating a patient with an USH2A gene containing a guanine deletion at nucleotide position c.2299. The method comprises: administering a first gRNA or sgRNA and second gRNA or sgRNA to the patient, wherein the first gRNA or sgRNA comprises SEQ ID NO: 5295 and the second gRNA or sgRNA comprises SEQ ID NO: 5296.

[0046] Also provided herein is a method for editing an USH2A gene containing a guanine deletion at nucleotide position c.2299. The method comprises: deleting a sequence comprising the guanine deletion at nucleotide position c.2299 of the USH2A gene in a cell using a first gRNA or sgRNA comprising SEQ ID NO: 5295 and a second gRNA or sgRNA comprising SEQ ID NO: 5302.

[0047] Also provided herein is a method for treating a patient with an USH2A gene containing a guanine deletion at nucleotide position c.2299. The method comprises: administering a first gRNA or sgRNA and second gRNA or sgRNA to the patient, wherein the first gRNA or sgRNA comprises SEQ ID NO: 5295 and the second gRNA or sgRNA comprises SEQ ID NO: 5302.

[0048] Also provided herein is a method for editing an USH2A gene containing a guanine deletion at nucleotide position c.2299. The method comprises: deleting a sequence comprising the guanine deletion at nucleotide position c.2299 of the USH2A gene in a cell using a first gRNA or sgRNA comprising SEQ ID NO: 5295 and a second gRNA or sgRNA comprising SEQ ID NO: 5310.

[0049] Also provided herein is a method for treating a patient with an USH2A gene containing a guanine deletion at nucleotide position c.2299. The method comprises: administering a first gRNA or sgRNA and second gRNA or sgRNA to the patient, wherein the first gRNA or sgRNA comprises SEQ ID NO: 5295 and the second gRNA or sgRNA comprises SEQ ID NO: 5310.

[0050] Also provided herein is a method for editing an USH2A gene containing a guanine deletion at nucleotide position c.2299. The method comprises: deleting a sequence comprising the guanine deletion at nucleotide position c.2299 of the USH2A gene in a cell using a first gRNA or sgRNA comprising SEQ ID NO: 5299 and a second gRNA or sgRNA comprising SEQ ID NO: 5276.

[0051] Also provided herein is a method for treating a patient with an USH2A gene containing a guanine deletion at nucleotide position c.2299. The method comprises: administering a first gRNA or sgRNA and second gRNA or sgRNA to the patient, wherein the first gRNA or sgRNA comprises SEQ ID NO: 5299 and the second gRNA or sgRNA comprises SEQ ID NO: 5276.

[0052] Also provided herein is a method for editing an USH2A gene containing a guanine deletion at nucleotide position c.2299. The method comprises: deleting a sequence comprising the guanine deletion at nucleotide position c.2299 of the USH2A gene in a cell using a first gRNA or sgRNA comprising SEQ ID NO: 5299 and a second gRNA or sgRNA comprising SEQ ID NO: 5275.

[0053] Also provided herein is a method for treating a patient with an USH2A gene containing a guanine deletion at nucleotide position c.2299. The method comprises: administering a first gRNA or sgRNA and second gRNA or sgRNA to the patient, wherein the first gRNA or sgRNA comprises SEQ ID NO: 5299 and the second gRNA or sgRNA comprises SEQ ID NO: 5275.

[0054] Also provided herein is a method for editing an USH2A gene containing a guanine deletion at nucleotide position c.2299. The method comprises: deleting a sequence comprising the guanine deletion at nucleotide position c.2299 of the USH2A gene in a cell using a first gRNA or sgRNA comprising SEQ ID NO: 5299 and a second gRNA or sgRNA comprising SEQ ID NO: 5277.

[0055] Also provided herein is a method for treating a patient with an USH2A gene containing a guanine deletion at nucleotide position c.2299. The method comprises: administering a first gRNA or sgRNA and second gRNA or sgRNA to the patient, wherein the first gRNA or sgRNA comprises SEQ ID NO: 5299 and the second gRNA or sgRNA comprises SEQ ID NO: 5277.

[0056] Also provided herein is a method for editing an USH2A gene containing a guanine deletion at nucleotide position c.2299. The method comprises: deleting a sequence comprising the guanine deletion at nucleotide position c.2299 of the USH2A gene in a cell using a first gRNA or sgRNA comprising SEQ ID NO: 5299 and a second gRNA or sgRNA comprising SEQ ID NO: 5278.

[0057] Also provided herein is a method for treating a patient with an USH2A gene containing a guanine deletion at nucleotide position c.2299. The method comprises: administering a first gRNA or sgRNA and second gRNA or sgRNA to the patient, wherein the first gRNA or sgRNA comprises SEQ ID NO: 5299 and the second gRNA or sgRNA comprises SEQ ID NO: 5278.

[0058] Also provided herein is a method for editing an USH2A gene containing a guanine deletion at nucleotide position c.2299. The method comprises: deleting a sequence comprising the guanine deletion at nucleotide position c.2299 of the USH2A gene in a cell using a first gRNA or sgRNA comprising SEQ ID NO: 5299 and a second gRNA or sgRNA comprising SEQ ID NO: 5287.

[0059] Also provided herein is a method for treating a patient with an USH2A gene containing a guanine deletion at nucleotide position c.2299. The method comprises: administering a first gRNA or sgRNA and second gRNA or sgRNA to the patient, wherein the first gRNA or sgRNA comprises SEQ ID NO: 5299 and the second gRNA or sgRNA comprises SEQ ID NO: 5287.

[0060] Also provided herein is a method for editing an USH2A gene containing a guanine deletion at nucleotide position c.2299. The method comprises: deleting a sequence comprising the guanine deletion at nucleotide position c.2299 of the USH2A gene in a cell using a first gRNA or sgRNA comprising SEQ ID NO: 5299 and a second gRNA or sgRNA comprising SEQ ID NO: 5286.

[0061] Also provided herein is a method for treating a patient with an USH2A gene containing a guanine deletion at nucleotide position c.2299. The method comprises: administering a first gRNA or sgRNA and second gRNA or sgRNA to the patient, wherein the first gRNA or sgRNA comprises SEQ ID NO: 5299 and the second gRNA or sgRNA comprises SEQ ID NO: 5286.

[0062] Also provided herein is a method for editing an USH2A gene containing a guanine deletion at nucleotide position c.2299. The method comprises: deleting a sequence comprising the guanine deletion at nucleotide position c.2299 of the USH2A gene in a cell using a first gRNA or sgRNA comprising SEQ ID NO: 5299 and a second gRNA or sgRNA comprising SEQ ID NO: 5290.

[0063] Also provided herein is a method for treating a patient with an USH2A gene containing a guanine deletion at nucleotide position c.2299. The method comprises: administering a first gRNA or sgRNA and second gRNA or sgRNA to the patient, wherein the first gRNA or sgRNA comprises SEQ ID NO: 5299 and the second gRNA or sgRNA comprises SEQ ID NO: 5290.

[0064] Also provided herein is a method for editing an USH2A gene containing a guanine deletion at nucleotide position c.2299. The method comprises: deleting a sequence comprising the guanine deletion at nucleotide position c.2299 of the USH2A gene in a cell using a first gRNA or sgRNA comprising SEQ ID NO: 5299 and a second gRNA or sgRNA comprising SEQ ID NO: 5291.

[0065] Also provided herein is a method for treating a patient with an USH2A gene containing a guanine deletion at nucleotide position c.2299. The method comprises: administering a first gRNA or sgRNA and second gRNA or sgRNA to the patient, wherein the first gRNA or sgRNA comprises SEQ ID NO: 5299 and the second gRNA or sgRNA comprises SEQ ID NO: 5291.

[0066] Also provided herein is a method for editing an USH2A gene containing a guanine deletion at nucleotide position c.2299. The method comprises: deleting a sequence comprising the guanine deletion at nucleotide position c.2299 of the USH2A gene in a cell using a first gRNA or sgRNA comprising SEQ ID NO: 5299 and a second gRNA or sgRNA comprising SEQ ID NO: 5292.

[0067] Also provided herein is a method for treating a patient with an USH2A gene containing a guanine deletion at nucleotide position c.2299. The method comprises: administering a first gRNA or sgRNA and second gRNA or sgRNA to the patient, wherein the first gRNA or sgRNA comprises SEQ ID NO: 5299 and the second gRNA or sgRNA comprises SEQ ID NO: 5292.

[0068] Also provided herein is a method for editing an USH2A gene containing a guanine deletion at nucleotide position c.2299. The method comprises: deleting a sequence comprising the guanine deletion at nucleotide position c.2299 of the USH2A gene in a cell using a first gRNA or sgRNA comprising SEQ ID NO: 5299 and a second gRNA or sgRNA comprising SEQ ID NO: 5294.

[0069] Also provided herein is a method for treating a patient with an USH2A gene containing a guanine deletion at nucleotide position c.2299. The method comprises: administering a first gRNA or sgRNA and second gRNA or sgRNA to the patient, wherein the first gRNA or sgRNA comprises SEQ ID NO: 5299 and the second gRNA or sgRNA comprises SEQ ID NO: 5294.

[0070] Also provided herein is a method for editing an USH2A gene containing a guanine deletion at nucleotide position c.2299. The method comprises: deleting a sequence comprising the guanine deletion at nucleotide position c.2299 of the USH2A gene in a cell using a first gRNA or sgRNA comprising SEQ ID NO: 5299 and a second gRNA or sgRNA comprising SEQ ID NO: 5296.

[0071] Also provided herein is a method for treating a patient with an USH2A gene containing a guanine deletion at nucleotide position c.2299. The method comprises: administering a first gRNA or sgRNA and second gRNA or sgRNA to the patient, wherein the first gRNA or sgRNA comprises SEQ ID NO: 5299 and the second gRNA or sgRNA comprises SEQ ID NO: 5296.

[0072] Also provided herein is a method for editing an USH2A gene containing a guanine deletion at nucleotide position c.2299. The method comprises: deleting a sequence comprising the guanine deletion at nucleotide position c.2299 of the USH2A gene in a cell using a first gRNA or sgRNA comprising SEQ ID NO: 5299 and a second gRNA or sgRNA comprising SEQ ID NO: 5302.

[0073] Also provided herein is a method for treating a patient with an USH2A gene containing a guanine deletion at nucleotide position c.2299. The method comprises: administering a first gRNA or sgRNA and second gRNA or sgRNA to the patient, wherein the first gRNA or sgRNA comprises SEQ ID NO: 5299 and the second gRNA or sgRNA comprises SEQ ID NO: 5302.

[0074] Also provided herein is a method for editing an USH2A gene containing a guanine deletion at nucleotide position c.2299. The method comprises: deleting a sequence comprising the guanine deletion at nucleotide position c.2299 of the USH2A gene in a cell using a first gRNA or sgRNA comprising SEQ ID NO: 5299 and a second gRNA or sgRNA comprising SEQ ID NO: 5310.

[0075] Also provided herein is a method for treating a patient with an USH2A gene containing a guanine deletion at nucleotide position c.2299. The method comprises: administering a first gRNA or sgRNA and second gRNA or sgRNA to the patient, wherein the first gRNA or sgRNA comprises SEQ ID NO: 5299 and the second gRNA or sgRNA comprises SEQ ID NO: 5310.

[0076] It is understood that the inventions described in this specification are not limited to the examples summarized in this Summary. Various other aspects are described and exemplified herein. This Summary is not intended to limit the scope of the claims.

### BRIEF DESCRIPTION OF THE DRAWINGS

[0077] Various aspects of materials and methods for treatment of Usher Syndrome and/or ARRP disclosed and described in this specification can be better understood by reference to the accompanying figures, in which:

[0078] FIG. 1A-B depict the type II CRISPR/Cas system;

[0079] FIG. 1A depicts the type II CRISPR/Cas system including gRNA;

[0080] FIG. 1B depicts the type II CRISPR/Cas system including sgRNA;

[0081] FIGS. 2A-C show the single guide RNA (sgRNA) sequence, the target DNA sequence, and the reverse strand of the target DNA sequence to which the sgRNA binds, for each of 43 sgRNA sequences;

[0082] FIG. 2A shows the single guide RNA (sgRNA) sequence, for each of 43 sgRNA sequences;

[0083] FIG. 2B shows the target DNA sequence, for each of 43 sgRNA sequences;

[0084] FIG. 2C shows the reverse strand of the target DNA sequence to which the sgRNA binds, for each of 43 sgRNA sequences;

[0085] FIGS. 3A-D show a diagram depicting a guanine deletion in exon 13 of the USH2A gene at nucleotide position c.2299, the result of excising the entire exon 13 including the guanine deletion, and the result of excising part of exon 13 including the guanine deletion;

[0086] FIG. 3A shows a diagram depicting a guanine deletion in exon 13 of the USH2A gene at nucleotide position c.2299 and the premature stop codon that results from the guanine deletion;

[0087] FIG. 3B shows a diagram depicting the result of deleting the entire exon 13 including the guanine deletion of the USH2A gene at nucleotide position c.2299; and

[0088] FIG. 3C shows a diagram depicting the result of deleting part of exon 13 including the guanine deletion of the USH2A gene at nucleotide position c.2299.

[0089] FIG. 3D shows a diagram depicting the result of deleting part of exon 13 including the guanine deletion of the USH2A gene at nucleotide position c.2299.

[0090] FIG. 4 shows editing efficiency data for each of the 43 sgRNAs listed in FIG. 2A. The sgRNAs target sequences in intron 12-13, exon 13, and/or intron 13-14 of the USH2A gene.

[0091] FIG. 5 shows locations within the USH2A gene that are targeted by selected sgRNAs.

[0092] FIGS. 6A-C show selected sgRNAs used as dual sgRNAs; a diagram showing possible ddPCR products amplified from genomic DNA; and exon 13 deletion efficiency data for selected sgRNAs used as dual sgRNAs.

[0093] FIG. 6A is a table listing selected sgRNAs used as dual sgRNAs, SED ID NOs for the sgRNA spacer sequences, and the expected sizes of deletions generated by genome editing.

[0094] FIG. 6B is a diagram showing possible ddPCR products amplified from USH2A gene genomic DNA, including a target PCR product of 216 bp amplified from exon 13 and a reference PCR product of 187 bp amplified from exon 17.

[0095] FIG. 6C shows exon 13 deletion efficiency data for selected sgRNAs used as dual sgRNAs. The sgRNAs can create whole and/or partial exon 13 deletions.

### BRIEF DESCRIPTION OF THE SEQUENCE LISTING

[0096] SEQ ID NOs: 1-612 are Cas endonuclease ortholog sequences.

[0097] SEQ ID NOs: 613-4696 are microRNA sequences.

[0098] SEQ ID NOs: 4697-5265 are AAV serotype sequences.

[0099] SEQ ID NO: 5266 is a human USH2A nucleotide sequence.

[0100] SEQ ID NOs: 5267-5269 show sample sgRNA backbone sequences that Streptococcus pyogenes Cas9 (SpCas9) is complexed with.

[0101] SEQ ID NO: 5270 is a sample guide RNA (gRNA) for a SpCas9 endonuclease.

[0102] SEQ ID NO: 5271 shows a known family of homing endonuclease, as classified by its structure.

[0103] SEQ ID NOs: 5272-5314 are 20 bp spacer sequences for targeting within or near intron 12-13, exon 13, or intron 13-14 of the USH2A gene with a S. pyogenes Cas9 endonuclease.

[0104] SEQ ID NOs: 5315-5357 are sequences that represent the target DNA sequences, for each of 43 sgRNA sequences.

[0105] SEQ ID NOs: 5358-5400 are sequences that represent the reverse strands of the target DNA sequence to which the sgRNA will bind, for each of 43 sgRNA sequences.

[0106] SEQ ID NOs: 5401 and 5402 are oligonucleotide sequences used to amplify a target PCR product from a section of genomic DNA from exon 13 of the USH2A gene.

[0107] SEQ ID NO: 5403 is a ddPCR oligonucleotide probe used to detect a target PCR product.

[0108] SEQ ID NOs: 5404 and 5405 are oligonucleotide sequences used to amplify a reference PCR product from a section of genomic DNA from exon 17 of the USH2A gene.

[0109] SEQ ID NO: 5406 is a ddPCR oligonucleotide probe used to detect a reference PCR product.

### DETAILED DESCRIPTION

[0110] Applicants have discovered a novel method for treating Usher Syndrome Type 2A and/or ARRP, e.g., an Usher Syndrome Type 2A or ARRP associated with an USH2A gene containing a c.2299delG. The method can result in slowing or reversing the development of Usher Syndrome Type 2A and/or ARRP or preventing development of either disease in an individual.

### Therapeutic Approach

[0111] The methods provided herein, regardless of whether a cellular, ex vivo or in vivo method can involve one or a combination of the following methods. One method involves excising c.2299delG located in exon 13 of the USH2A gene by deleting the entire exon 13, as depicted in FIG. 3B. A second method involves partially excising the c.2299delG located in exon 13 of the USH2A gene by partially deleting exon 13, as depicted in FIG. 3C. A third method involves partially excising the c.2299delG located in exon 13 of the USH2A gene by partially deleting exon 13, as depicted in FIG. 3D. A fourth method involves correcting the c.2299delG located in exon 13 of a USH2A gene by first deleting the entire exon 13 or partially deleting exon 13 and then correcting via HDR.

[0112] The three excision methods can induce a SSB or DSB upstream of the c.2299delG and a SSB or DSB downstream of the c.2299delG using one or more CRISPR endonucleases and two gRNA (e.g., crRNA+tracrRNA, or sgRNA).

[0113] In the first excision method, as depicted in FIG. 3B, a first guide RNA (e.g., crRNA+tracrRNA, or sgRNA), targets within or near the intron 12-13 region of the USH2A gene and a second guide RNA (e.g., crRNA+tracrRNA, or sgRNA) targets within or near the intron 13-14 region of the USH2A gene. Intron 12-13 is 3,676 bps and is located upstream of exon 13 of the USH2A gene. Intron 13-14 is 14,448 bp and is located downstream of exon 13 of the USH2A gene. The two SSBs or DSBs generated by the two guide RNAs delete the entire exon 13, which is 642 bp, including the c.2299delG via NHEJ, which results in a shortened usherin protein. The shortened usherin protein lacks 4 of 10 Rod-like laminin-EGF-like (LE) domains, but can remain as a functional protein. This first excision method utilizes gRNAs or sgRNAs specific for the regions upstream of the c.2299delG, such as within or near the intron 12-13 region of the USH2A. This first excision method further utilizes gRNAs or gRNAs specific for the regions downstream of the c.2299delG, such as within or near the intron 13-14 region of the USH2A gene.

[0114] In the second excision method, as depicted in FIG. 3C, a first guide RNA (e.g., crRNA+tracrRNA, or sgRNA), targets within or near the intron 12-13 region of the USH2A gene and a second guide RNA (e.g., crRNA+tracrRNA, or sgRNA) targets within exon 13 of the USH2A gene. The two SSBs or DSBs generated by the two guide RNAs partially delete exon 13, including the c.2299delG via NHEJ, which results in a shortened usherin protein. In addition to the c.2299delG, the deletion can also include the branch sequence and the acceptor splice site. The absence of the branch sequence and 5′acceptor splice site leads to exon 13 skipping during mRNA processing. The exon 13 skipping generates an in-frame, but shorter usherin protein. This second excision method utilizes gRNAs or sgRNAs specific for the regions upstream of the c.2299delG, such as within or near the intron 12-13 region of the USH2A. This second excision method further utilizes gRNAs or sgRNAs specific for the regions downstream of the c.2299delG, such as within exon 13 of the USH2A gene.

[0115] In the third excision method, as depicted in FIG. 3D, a first guide RNA (e.g., crRNA+tracrRNA, or sgRNA), targets within exon 13 of the USH2A gene and a second guide RNA (e.g., crRNA+tracrRNA, or sgRNA) targets within or near the intron 13-14 region of the USH2A gene. The two SSBs or DSBs generated by the two guide RNAs partially delete exon 13, including the c.2299delG via NHEJ, which results in a shortened usherin protein. In addition to the c.2299delG, the deletion can also include the donor splice site and the branch site. The absence of the donor splice site and/or branch site leads to exon 13 skipping during mRNA processing. The exon 13 skipping generates an in-frame, but shorter usherin protein. This third excision method utilizes gRNAs or sgRNAs specific for the regions upstream of the c.2299delG, such as within exon 13 of the USH2A. This third excision method further utilizes gRNAs or sgRNAs specific for the regions downstream of the c.2299delG, such as within or near intron 13-14 of the USH2A gene.

[0116] The deletions can be from 50 to 10,000 base pairs (bp) in size. For example, deletions can range from 50-100; 50-150; 50-200; 50-250; 50-500; 50-1000; 50-1,500; 50-2,000; 50-2,500; 50-3,000; 50-3,500; 50-4,000, 50-4,500; 50-5,000; 50-5,500; 50-6,000; 50-6,500; 50-7,000; 50-7,500; 50-8,000; 50-8,500; 50-9,000; 50-9,500; 50-10,000, 150-5000, 150-7500, 100-1000, 200-1000, 300-1000, 400-1000, 500-1000, 600-1000, 700-1000, 800-1000, 900-1000, or 200-850 base pairs in size.

[0117] The HDR strategy can involve inducing one single-stranded break or double-stranded break upstream and downstream of the c.2299delG in the USH2A gene with one or more CRISPR endonucleases and a gRNA (e.g., crRNA+tracrRNA, or sgRNA), or two or more single-stranded breaks or double-stranded breaks upstream and downstream of the c.2299delG in the USH2A gene with one or more CRISPR endonucleases (Cas9, Cpf1 and the like) and two or more gRNAs, in the presence of a donor DNA template introduced exogenously to direct the cellular DSB response to Homology-Directed Repair. The donor DNA template can be a short single-stranded oligonucleotide, a short double-stranded oligonucleotide, a long single or double-stranded DNA molecule. The methods can provide gRNA pairs that make a deletion by cutting the gene twice, one gRNA cutting upstream of the c.2299delG and the other gRNA cutting downstream of the c.2299delG that facilitates insertion of a new sequence from a polynucleotide donor template to replace the c.2299delG in the USH2A gene. The cutting can be accomplished by a pair of DNA endonucleases that each makes a DSB (one DSB upstream of the c.2299delG and the second DSB downstream of the c.2299delG), or by multiple nickases that together make a DSB (one DSB upstream of the c.2299delG and the second DSB downstream of the c.2299delG). This HDR method utilizes gRNAs or sgRNAs that target regions upstream and downstream of the c.2299delG in the USH2A gene and donor DNA molecules.

[0118] The advantages for the above strategies (excision and HDR strategies) are similar, including in principle both short and long term beneficial clinical and laboratory effects.

[0119] Such methods use endonucleases, such as CRISPR-associated (Cas9, Cpf1 and the like) nucleases, to stably correct the c.2299delG within the genomic locus of the USH2A gene. Any CRISPR endonuclease can be used in the methods of the present disclosure, each CRISPR endonuclease having its own associated PAM, which can or cannot be disease specific. For example, gRNA spacer sequences for targeting the c.2299delG in the USH2A gene with a CRISPR/Cas9 endonuclease from S. pyogenes have been identified in SEQ ID NOs: 5272-5314 of the Sequence Listing.

[0120] Examples set forth in the present disclosure can induce single-stranded breaks or double-stranded breaks upstream and downstream of the c.2299delG in the USH2A gene to introduce an excision or correct the c.2299delG of the USH2A gene with as few as a single treatment (rather than deliver potential therapies for the lifetime of the patient).

### Usher Syndrome

[0121] Usher syndrome is an autosomal recessive disease, characterized by sensorineural hearing loss, retinitis pigmentosa and in some cases, vestibular dysfunction. The prevalence of Usher Syndrome has been estimated to be between 1/6000 and 1/25000.

[0122] Usher Syndrome is a clinically and genetically heterogeneous disease, accounting for about half of all cases of combined hereditary deafness-blindness. To date the disease has been associated with 13 genes. Three clinical forms of the disease have been identified (USH I, II, and III) based on the severity of the hearing impairment, the presence or absence of vestibular dysfunction, and the age of onset of the disease.

[0123] Usher Syndrome Type II is the most frequent clinical form accounting for approximately 50% of all Usher Syndrome cases. Usher Syndrome Type II is characterized by congenital hearing loss and progressive vision loss starting in adolescence or adulthood. The hearing loss ranges from mild to severe and mainly affects the ability to hear high-frequency sounds. Vision loss occurs as the light-sensing cells of the retina gradually deteriorate. Night vision loss begins first, followed by loss of the peripheral vision. With time, these blind areas enlarge and merge to produce tunnel vision. In some cases, vision is further impaired by cataracts. Many patients become legally blind in the 5^{th} decade of life.

[0124] Usher Syndrome Type 2A is due to a mutation in the USH2A gene and accounts for approximately 80% of all Usher Syndrome Type II cases and 40% of all Usher Syndrome cases.

### Non-Syndromic Autosomal Recessive Retinitis Pigmentosa (ARRP)

[0125] 8% of non-syndromic ARRP patients have mutations in the USH2A gene with a high prevalence of the mutations being c.2299delG located in exon 13 of the USH2A gene.

### USH2A Gene

[0126] The USH2A gene (e.g., SEQ ID NO: 5266) is 800,503 base pairs and is located on Chromosome 1: 215,622,893:216,423,395 (Genome Reference Consortium—GRCh38/hg38) (1q41). USH2A gene comprises 72 exons and encodes for two alternatively spliced isoforms of a protein called usherin. The full-length 580 kDa usherin protein (isoform b) is a complex transmembrane protein of 5,202 amino acids with a large extracellular domain. The short 170 kDa usherin protein (isoform a) is translated from the splice variant consisting of only the first 21 coding exons, and is regarded as an extracellular protein of 1546 amino acids.

[0127] The usherin protein is located next to vesicle loading point at the periciliary membrane and may play a role in vesicle transport between the inner segments and the outer segments of photoreceptors.

c.2299delG

[0128] There are various mutations associated with Usher Syndrome, which can be insertions, deletions, missense, nonsense, frameshift and other mutations, with the common effect of inactivating the USH2A gene.

[0129] The most common mutation in USH2A patients is a single nucleotide deletion, e.g., a guanine deletion in exon 13 at nucleotide position c.2299 (c.2299delG/p.E767Sfs*21) in the USH2A gene. This mutation accounts for up to 30% of all USH2A patients, depending on the population, and leads to a frameshift that generates a premature stop codon (p.E767Sfs*21), as depicted in FIG. 3A. The truncated protein disrupts hearing and vision, leading to visual and hearing loss.

[0130] Any one or more of the mutations can be repaired to restore the usherin protein function. For example, the pathological variant, c.2299delG, can be excised or corrected to restore the usherin protein expression (See Table 1).

TABLE 1

| Variant | Location | Variant type |
|---|---|---|
| c.2299delG | 1:216247095 | deletion |
| | (GRCh38/hg38) | |

### In Vivo Based Therapy

[0131] Provided herein are methods for treating a patient with one or more of Usher Syndrome Type 2A and ARRP. In some aspects, the method is an in vivo cell-based therapy. Chromosomal DNA of the cells in the Usher Syndrome type 2A and/or ARRP patient can be edited using the materials and methods described herein. For example, the in vivo method can comprise editing a c.2299delG in a USH2A gene in a cell of a patient, such as photoreceptor cells or retinal progenitor cells.

[0132] Although certain cells present an attractive target for ex vivo treatment and therapy, increased efficacy in delivery may permit direct in vivo delivery to such cells. Ideally the targeting and editing would be directed to the relevant cells. Cleavage in other cells can also be prevented by the use of promoters only active in certain cells and or developmental stages. Additional promoters are inducible, and therefore can be temporally controlled if the nuclease is delivered as a plasmid. The amount of time that delivered RNA and protein remain in the cell can also be adjusted using treatments or domains added to change the half-life. In vivo treatment would eliminate a number of treatment steps, but a lower rate of delivery can require higher rates of editing. In vivo treatment can eliminate problems and losses from ex vivo treatment and engraftment.

[0133] An advantage of in vivo gene therapy can be the ease of therapeutic production and administration. The same therapeutic approach and therapy will have the potential to be used to treat more than one patient, for example a number of patients who share the same or similar genotype or allele. In contrast, ex vivo cell therapy typically requires using a patient's own cells, which are isolated, manipulated and returned to the same patient.

### Ex Vivo Based Therapy

[0134] Provided herein are methods for treating a patient with one or more of Usher Syndrome type 2A and ARRP. An aspect of such method is an ex vivo cell-based therapy. For example, a patient-specific induced pluripotent stem cell (iPSC) can be created. Then, the chromosomal DNA of these iPSC cells can be edited using the materials and methods described herein. For example, the method can comprise editing a c.2299delG in a USH2A gene of the iPSC. Next, the genome-edited iPSCs can be differentiated into other cells, such as photoreceptor cells or retinal progenitor cells. Finally, the differentiated cells, such as photoreceptor cell or retinal progenitor cell, can be implanted into the patient (i.e., implanted into the patient's eye).

[0135] Another aspect of such method is an ex vivo cell-based therapy. For example, photoreceptor cells or retinal progenitor cells can be isolated from the patient. Next, the chromosomal DNA of these photoreceptor cells or retinal progenitor cells can be edited using the materials and methods described herein. For example, the method can comprise editing a c.2299delG in a USH2A gene of the photoreceptor cells or retinal progenitor cells. Finally, the genome-edited photoreceptor cells or retinal progenitor cells can be implanted into the patient (i.e., implanted into the patient's eye).

[0136] Another aspect of such method is an ex vivo cell-based therapy. For example, a mesenchymal stem cell can be isolated from the patient, which can be isolated from the patient's bone marrow, peripheral blood, adipose tissue, or umbilical cord. Next, the chromosomal DNA of these mesenchymal stem cells can be edited using the materials and methods described herein. For example, the method can comprise editing a c.2299delG in a USH2A gene of the mesenchymal stem cells. Next, the genome-edited mesenchymal stem cells can be differentiated into any type of cell, e.g., photoreceptor cells or retinal progenitor cells. Finally, the differentiated cells, e.g., photoreceptor cells or retinal progenitor cells can be implanted into the patient (i.e., implanted into the patient's eye).

[0137] One advantage of an ex vivo cell therapy approach is the ability to conduct a comprehensive analysis of the therapeutic prior to administration. Nuclease-based therapeutics can have some level of off-target effects. Performing gene correction ex vivo allows one to characterize the corrected cell population prior to implantation. The present disclosure includes sequencing the entire genome of the corrected cells to ensure that the off-target effects, if any, can be in genomic locations associated with minimal risk to the patient. Furthermore, populations of specific cells, including clonal populations, can be isolated prior to implantation.

[0138] Another advantage of ex vivo cell therapy relates to genetic correction in iPSCs compared to other primary cell sources. iPSCs are prolific, making it easy to obtain the large number of cells that will be required for a cell-based therapy. Furthermore, iPSCs are an ideal cell type for performing clonal isolations. This allows screening for the correct genomic correction, without risking a decrease in viability. In contrast, other primary cells, such as photoreceptor cells or retinal progenitor cells, are viable for only a few passages and difficult to clonally expand. Thus, manipulation of iPSCs for the treatment of one or more of Usher Syndrome Type 2A and ARRP can be much easier, and can shorten the amount of time needed to make the desired genetic correction.

### Genome Editing

[0139] Genome editing refers to the process of modifying the nucleotide sequence of a genome, such as in a precise or pre-determined manner. Examples of methods of genome editing described herein include methods of using site-directed nucleases to cut DNA at precise target locations in the genome, thereby creating single-strand or double-strand DNA breaks at particular locations within the genome. Such breaks can be and regularly are repaired by natural, endogenous cellular processes, such as HDR and NHEJ. These two main DNA repair processes consist of a family of alternative pathways. NHEJ directly joins the DNA ends resulting from a double-strand break, sometimes with the loss or addition of nucleotide sequence, which may disrupt or enhance gene expression. HDR utilizes a homologous sequence, or donor sequence, as a template for inserting a defined DNA sequence at the break point. The homologous sequence can be in the endogenous genome, such as a sister chromatid. Alternatively, the donor can be an exogenous nucleic acid, such as a plasmid, a single-strand oligonucleotide, a double-stranded oligonucleotide, a duplex oligonucleotide or a virus, that has regions of high homology with the nuclease-cleaved locus, but which can also contain additional sequence or sequence changes including deletions that can be incorporated into the cleaved target locus. A third repair mechanism can be microhomology-mediated end joining (MMEJ), also referred to as “Alternative NHEJ (ANHEJ)”, in which the genetic outcome is similar to NHEJ in that small deletions and insertions can occur at the cleavage site. MMEJ can make use of homologous sequences of a few base pairs flanking the DNA break site to drive a more favored DNA end joining repair outcome, and recent reports have further elucidated the molecular mechanism of this process. In some instances, it may be possible to predict likely repair outcomes based on analysis of potential microhomologies at the site of the DNA break.

[0140] Each of these genome editing mechanisms can be used to create desired genomic alterations. A step in the genome editing process can be to create one or two DNA breaks, the latter as double-strand breaks or as two single-stranded breaks, in the target locus as near the site of intended mutation. This can be achieved via the use of site-directed polypeptides, as described and illustrated herein.

[0141] Site-directed polypeptides, such as a DNA endonuclease, can introduce double-strand breaks or single-strand breaks in nucleic acids, e.g., genomic DNA. The double-strand break can stimulate a cell's endogenous DNA-repair pathways [e.g., homology-dependent repair (HDR) or non-homologous end joining (NHEJ) or (ANHEJ) or (MMEJ)]. NHEJ can repair cleaved target nucleic acid without the need for a homologous template. This can sometimes result in small deletions or insertions (indels) in the target nucleic acid at the site of cleavage, and can lead to disruption or alteration of gene expression.

[0142] HDR can occur when a homologous repair template, or donor, is available. The homologous donor template can comprise at least a portion of the wild-type USH2A gene, or cDNA. The at least a portion of the wild-type USH2A gene or cDNA can be exon 1, exon 2, exon 3, exon 4, exon 5, exon 6, exon 7, exon 8, exon 9, exon 10, exon 11, exon 12, exon 13, exon 14, exon 15, exon 16, exon 17, exon 18, exon 19, exon 20, exon 21, exon 22, exon 23, exon 24, exon 25, exon 26, exon 27, exon 28, exon 29, exon 30, exon 31, exon 32, exon 33, exon 34, exon 35, exon 36, exon 37, exon 38, exon 39, exon 40, exon 41, exon 42, exon 43, exon 44, exon 45, exon 46, exon 47, exon 48, exon 49, exon 50, exon 51, exon 52, exon 53, exon 54, exon 55, exon 56, exon 57, exon 58, exon 59, exon 60, exon 61, exon 62, exon 63, exon 64, exon 65, exon 66, exon 67, exon 68, exon 69, exon 70, exon 71, exon 72, intronic regions, fragments or combinations thereof, or the entire USH2A gene or cDNA.

[0143] The donor template can be either a single or double-stranded polynucleotide. The donor template can be up to 10 kb. The donor template can be up to 9 kb. The donor template can be up to 8 kb. The donor template can be up to 7 kb. The donor template can be up to 6 kb. The donor template can be up to 5 kb. The donor template can be up to 4 kb. The donor template can be up to 3 KB. The donor template can be up to 2 kb. The donor template can be up to 1 kb. The donor template can be less than 1 kb. The donor template can be 500-1000 bp. The donor template can be 250-500 bp. The donor template can be 100-250 bp. The donor template can be 50-100 bp. The donor template can be delivered by AAV. The homologous donor template can comprise sequences that can be homologous to sequences flanking the target nucleic acid cleavage site. For example, the donor template can have homologous arms to exon 13. The sister chromatid can be used by the cell as the repair template. However, for the purposes of genome editing, the repair template can be supplied as an exogenous nucleic acid, such as a plasmid, duplex oligonucleotide, single-strand oligonucleotide, double-stranded oligonucleotide, or viral nucleic acid. With exogenous donor templates, an additional nucleic acid sequence (such as a transgene) or modification (such as a single or multiple base change or a deletion) can be introduced between the flanking regions of homology so that the additional or altered nucleic acid sequence also becomes incorporated into the target locus. MMEJ can result in a genetic outcome that is similar to NHEJ as small deletions and insertions can occur at the cleavage site. MMEJ can make use of homologous sequences of a few base pairs flanking the cleavage site to drive a favored end-joining DNA repair outcome. In some instances, it may be possible to predict likely repair outcomes based on analysis of potential microhomologies in the nuclease target regions.

[0144] Thus, in some cases, homologous recombination can be used to insert an exogenous polynucleotide sequence into the target nucleic acid cleavage site. An exogenous polynucleotide sequence is termed a donor polynucleotide (or donor or donor sequence or polynucleotide donor template) herein. The donor polynucleotide, a portion of the donor polynucleotide, a copy of the donor polynucleotide, or a portion of a copy of the donor polynucleotide can be inserted into the target nucleic acid cleavage site. The donor polynucleotide can be an exogenous polynucleotide sequence, i.e., a sequence that does not naturally occur at the target nucleic acid cleavage site.

[0145] The modifications of the target DNA due to NHEJ and/or HDR can lead to, for example, gene correction.

### CRISPR Endonuclease System

[0146] A CRISPR (Clustered Regularly Interspaced Short Palindromic Repeats) genomic locus can be found in the genomes of many prokaryotes (e.g., bacteria and archaea). In prokaryotes, the CRISPR locus encodes products that function as a type of immune system to help defend the prokaryotes against foreign invaders, such as virus and phage. There are three stages of CRISPR locus function: integration of new sequences into the CRISPR locus, expression of CRISPR RNA (crRNA), and silencing of foreign invader nucleic acid. Five types of CRISPR systems (e.g., Type I, Type II, Type III, Type U, and Type V) have been identified.

[0147] A CRISPR locus includes a number of short repeating sequences referred to as “repeats.” When expressed, the repeats can form secondary structures (e.g., hairpins) and/or comprise unstructured single-stranded sequences. The repeats usually occur in clusters and frequently diverge between species. The repeats are regularly interspaced with unique intervening sequences referred to as “spacers,” resulting in a repeat-spacer-repeat locus architecture. The spacers are identical to or have high homology with known foreign invader sequences. A spacer-repeat unit encodes a crisprRNA (crRNA), which is processed into a mature form of the spacer-repeat unit. A crRNA comprises a “seed” or spacer sequence that is involved in targeting a target nucleic acid (in the naturally occurring form in prokaryotes, the spacer sequence targets the foreign invader nucleic acid). A spacer sequence is located at the 5′ or 3′ end of the crRNA.

[0148] A CRISPR locus also comprises polynucleotide sequences encoding CRISPR Associated (Cas) genes. Cas genes encode endonucleases involved in the biogenesis and the interference stages of crRNA function in prokaryotes. Some Cas genes comprise homologous secondary and/or tertiary structures.

### Type II CRISPR Systems

[0149] crRNA biogenesis in a Type II CRISPR system in nature requires a trans-activating CRISPR RNA (tracrRNA). The tracrRNA can be modified by endogenous RNaseIII, and then hybridizes to a crRNA repeat in the pre-crRNA array. Endogenous RNaseIII can be recruited to cleave the pre-crRNA. Cleaved crRNAs can be subjected to exoribonuclease trimming to produce the mature crRNA form (e.g., 5′ trimming). The tracrRNA can remain hybridized to the crRNA, and the tracrRNA and the crRNA associate with a site-directed polypeptide (e.g., Cas9). The crRNA of the crRNA-tracrRNA-Cas9 complex can guide the complex to a target nucleic acid to which the crRNA can hybridize. Hybridization of the crRNA to the target nucleic acid can activate Cas9 for targeted nucleic acid cleavage. The target nucleic acid in a Type II CRISPR system is referred to as a protospacer adjacent motif (PAM). In nature, the PAM is essential to facilitate binding of a site-directed polypeptide (e.g., Cas9) to the target nucleic acid. Type II systems (also referred to as Nmeni or CASS4) are further subdivided into Type II-A (CASS4) and II-B (CASS4a). Jinek et al., Science, 337(6096):816-821 (2012) showed that the CRISPR/Cas9 system is useful for RNA-programmable genome editing, and international patent application publication number WO2013/176772 provides numerous examples and applications of the CRISPR/Cas endonuclease system for site-specific gene editing.

### Type V CRISPR Systems

[0150] Type V CRISPR systems have several important differences from Type II systems. For example, Cpf1 is a single RNA-guided endonuclease that, in contrast to Type II systems, lacks tracrRNA. In fact, Cpf1-associated CRISPR arrays can be processed into mature crRNAs without the requirement of an additional trans-activating tracrRNA. The Type V CRISPR array can be processed into short mature crRNAs of 42-44 nucleotides in length, with each mature crRNA beginning with 19 nucleotides of direct repeat followed by 23-25 nucleotides of spacer sequence. In contrast, mature crRNAs in Type II systems can start with 20-24 nucleotides of spacer sequence followed by about 22 nucleotides of direct repeat. Also, Cpf1 can utilize a T-rich protospacer-adjacent motif such that Cpf1-crRNA complexes efficiently cleave target DNA preceded by a short T-rich PAM, which is in contrast to the G-rich PAM following the target DNA for Type II systems. Thus, Type V systems cleave at a point that is distant from the PAM, while Type II systems cleave at a point that is adjacent to the PAM. In addition, in contrast to Type II systems, Cpf1 cleaves DNA via a staggered DNA double-stranded break with a 4 or 5 nucleotide 5′ overhang. Type II systems cleave via a blunt double-stranded break. Similar to Type II systems, Cpf1 contains a predicted RuvC-like endonuclease domain, but lacks a second HNH endonuclease domain, which is in contrast to Type II systems.

### Cas Genes/Polypeptides and Protospacer Adjacent Motifs

[0151] Exemplary CRISPR/Cas polypeptides include the Cas9 polypeptides in FIG. 1 of Fonfara et al., Nucleic Acids Research, 42: 2577-2590 (2014). The CRISPR/Cas gene naming system has undergone extensive rewriting since the Cas genes were discovered. FIG. 5 of Fonfara, supra, provides PAM sequences for the Cas9 polypeptides from various species.

### Site-Directed Polypeptides

[0152] A site-directed polypeptide is a nuclease used in genome editing to cleave DNA. The site-directed nuclease can be administered to a cell or a patient as either: one or more polypeptides, or one or more mRNAs encoding the polypeptide. Any of the enzymes or orthologs listed in SEQ ID NOs: 1-612, or disclosed herein, can be utilized in the methods herein.

[0153] In the context of a CRISPR/Cas or CRISPR/Cpf1 system, the site-directed polypeptide can bind to a guide RNA that, in turn, specifies the site in the target DNA to which the polypeptide is directed. In the CRISPR/Cas or CRISPR/Cpf1 systems disclosed herein, the site-directed polypeptide can be an endonuclease, such as a DNA endonuclease.

[0154] A site-directed polypeptide can comprise a plurality of nucleic acid-cleaving (i.e., nuclease) domains. Two or more nucleic acid-cleaving domains can be linked together via a linker. For example, the linker can comprise a flexible linker. Linkers can comprise 1, 2, 3, 4, 5, 6, 7, 8, 9, 10, 11, 12, 13, 14, 15, 16, 17, 18, 19, 20, 21, 22, 23, 24, 25, 30, 35, 40 or more amino acids in length.

[0155] Naturally-occurring wild-type Cas9 enzymes comprise two nuclease domains, a HNH nuclease domain and a RuvC domain. Herein, the “Cas9” refers to both naturally occurring and recombinant Cas9s. Cas9 enzymes contemplated herein can comprise a HNH or HNH-like nuclease domain, and/or a RuvC or RuvC-like nuclease domain.

[0156] HNH or HNH-like domains comprise a McrA-like fold. HNH or HNH-like domains comprises two antiparallel β-strands and an α-helix. HNH or HNH-like domains comprises a metal binding site (e.g., a divalent cation binding site). HNH or HNH-like domains can cleave one strand of a target nucleic acid (e.g., the complementary strand of the crRNA targeted strand).

[0157] RuvC or RuvC-like domains comprise an RNaseH or RNaseH-like fold. RuvC/RNaseH domains are involved in a diverse set of nucleic acid-based functions including acting on both RNA and DNA. The RNaseH domain comprises 5 β-strands surrounded by a plurality of α-helices. RuvC/RNaseH or RuvC/RNaseH-like domains comprise a metal binding site (e.g., a divalent cation binding site). RuvC/RNaseH or RuvC/RNaseH-like domains can cleave one strand of a target nucleic acid (e.g., the non-complementary strand of a double-stranded target DNA).

[0158] Site-directed polypeptides can introduce double-strand breaks or single-strand breaks in nucleic acids, e.g., genomic DNA. The double-strand break can stimulate a cell's endogenous DNA-repair pathways (e.g., HDR or NHEJ or ANHEJ or MMEJ). NHEJ can repair cleaved target nucleic acid without the need for a homologous template. This can sometimes result in small deletions or insertions (indels) in the target nucleic acid at the site of cleavage, and can lead to disruption or alteration of gene expression. HDR can occur when a homologous repair template, or donor, is available. The homologous donor template can comprise sequences that are homologous to sequences flanking the target nucleic acid cleavage site. The sister chromatid can be used by the cell as the repair template. However, for the purposes of genome editing, the repair template can be supplied as an exogenous nucleic acid, such as a plasmid, duplex oligonucleotide, single-strand oligonucleotide or viral nucleic acid. With exogenous donor templates, an additional nucleic acid sequence (such as a transgene) or modification (such as a single or multiple base change or a deletion) can be introduced between the flanking regions of homology so that the additional or altered nucleic acid sequence also becomes incorporated into the target locus. MMEJ can result in a genetic outcome that is similar to NHEJ as small deletions and insertions can occur at the cleavage site. MMEJ can make use of homologous sequences of a few base pairs flanking the cleavage site to drive a favored end-joining DNA repair outcome. In some instances, it may be possible to predict likely repair outcomes based on analysis of potential microhomologies in the nuclease target regions.

[0159] Thus, in some cases, homologous recombination can be used to insert an exogenous polynucleotide sequence into the target nucleic acid cleavage site. An exogenous polynucleotide sequence is termed a donor polynucleotide (or donor or donor sequence) herein. The donor polynucleotide, a portion of the donor polynucleotide, a copy of the donor polynucleotide, or a portion of a copy of the donor polynucleotide can be inserted into the target nucleic acid cleavage site. The donor polynucleotide can be an exogenous polynucleotide sequence, i.e., a sequence that does not naturally occur at the target nucleic acid cleavage site.

[0160] The site-directed polypeptide can comprise an amino acid sequence having at least 10%, at least 15%, at least 20%, at least 30%, at least 40%, at least 50%, at least 60%, at least 70%, at least 75%, at least 80%, at least 85%, at least 90%, at least 95%, at least 99%, or 100% amino acid sequence identity to a wild-type exemplary site-directed polypeptide [e.g., Cas9 from S. pyogenes, US2014/0068797 Sequence ID No. 8 or Sapranauskas et al., Nucleic Acids Res, 39(21): 9275-9282 (2011)], and various other site-directed polypeptides. The site-directed polypeptide can comprise at least 70, 75, 80, 85, 90, 95, 97, 99, or 100% identity to a wild-type site-directed polypeptide (e.g., Cas9 from S. pyogenes, supra) over 10 contiguous amino acids. The site-directed polypeptide can comprise at most: 70, 75, 80, 85, 90, 95, 97, 99, or 100% identity to a wild-type site-directed polypeptide (e.g., Cas9 from S. pyogenes, supra) over 10 contiguous amino acids. The site-directed polypeptide can comprise at least: 70, 75, 80, 85, 90, 95, 97, 99, or 100% identity to a wild-type site-directed polypeptide (e.g., Cas9 from S. pyogenes, supra) over 10 contiguous amino acids in a HNH nuclease domain of the site-directed polypeptide. The site-directed polypeptide can comprise at most: 70, 75, 80, 85, 90, 95, 97, 99, or 100% identity to a wild-type site-directed polypeptide (e.g., Cas9 from S. pyogenes, supra) over 10 contiguous amino acids in a HNH nuclease domain of the site-directed polypeptide. The site-directed polypeptide can comprise at least: 70, 75, 80, 85, 90, 95, 97, 99, or 100% identity to a wild-type site-directed polypeptide (e.g., Cas9 from S. pyogenes, supra) over 10 contiguous amino acids in a RuvC nuclease domain of the site-directed polypeptide. The site-directed polypeptide can comprise at most: 70, 75, 80, 85, 90, 95, 97, 99, or 100% identity to a wild-type site-directed polypeptide (e.g., Cas9 from S. pyogenes, supra) over 10 contiguous amino acids in a RuvC nuclease domain of the site-directed polypeptide.

[0161] The site-directed polypeptide can comprise a modified form of a wild-type exemplary site-directed polypeptide. The modified form of the wild-type exemplary site-directed polypeptide can comprise a mutation that reduces the nucleic acid-cleaving activity of the site-directed polypeptide. The modified form of the wild-type exemplary site-directed polypeptide can have less than 90%, less than 80%, less than 70%, less than 60%, less than 50%, less than 40%, less than 30%, less than 20%, less than 10%, less than 5%, or less than 1% of the nucleic acid-cleaving activity of the wild-type exemplary site-directed polypeptide (e.g., Cas9 from S. pyogenes, supra). The modified form of the site-directed polypeptide can have no substantial nucleic acid-cleaving activity. When a site-directed polypeptide is a modified form that has no substantial nucleic acid-cleaving activity, it is referred to herein as “enzymatically inactive.”

[0162] The modified form of the site-directed polypeptide can comprise a mutation such that it can induce a SSB on a target nucleic acid (e.g., by cutting only one of the sugar-phosphate backbones of a double-strand target nucleic acid). The mutation can result in less than 90%, less than 80%, less than 70%, less than 60%, less than 50%, less than 40%, less than 30%, less than 20%, less than 10%, less than 5%, or less than 1% of the nucleic acid-cleaving activity in one or more of the plurality of nucleic acid-cleaving domains of the wild-type site directed polypeptide (e.g., Cas9 from S. pyogenes, supra). The mutation can result in one or more of the plurality of nucleic acid-cleaving domains retaining the ability to cleave the complementary strand of the target nucleic acid, but reducing its ability to cleave the non-complementary strand of the target nucleic acid. The mutation can result in one or more of the plurality of nucleic acid-cleaving domains retaining the ability to cleave the non-complementary strand of the target nucleic acid, but reducing its ability to cleave the complementary strand of the target nucleic acid. For example, residues in the wild-type exemplary S. pyogenes Cas9 polypeptide, such as Asp10, His840, Asn854 and Asn856, are mutated to inactivate one or more of the plurality of nucleic acid-cleaving domains (e.g., nuclease domains). The residues to be mutated can correspond to residues Asp10, His840, Asn854 and Asn856 in the wild-type exemplary S. pyogenes Cas9 polypeptide (e.g., as determined by sequence and/or structural alignment). Non-limiting examples of mutations include D10A, H840A, N854A or N856A. Mutations other than alanine substitutions can be suitable.

[0163] A D10A mutation can be combined with one or more of H840A, N854A, or N856A mutations to produce a site-directed polypeptide substantially lacking DNA cleavage activity. A H840A mutation can be combined with one or more of D10A, N854A, or N856A mutations to produce a site-directed polypeptide substantially lacking DNA cleavage activity. A N854A mutation can be combined with one or more of H840A, D10A, or N856A mutations to produce a site-directed polypeptide substantially lacking DNA cleavage activity. A N856A mutation can be combined with one or more of H840A, N854A, or D10A mutations to produce a site-directed polypeptide substantially lacking DNA cleavage activity. Site-directed polypeptides that comprise one substantially inactive nuclease domain are referred to as “nickases”.

[0164] Nickase variants of RNA-guided endonucleases, for example Cas9, can be used to increase the specificity of CRISPR-mediated genome editing. Wild type Cas9 is typically guided by a single guide RNA designed to hybridize with a specified ˜20 nucleotide sequence in the target sequence (such as an endogenous genomic locus). However, several mismatches can be tolerated between the guide RNA and the target locus, effectively reducing the length of required homology in the target site to, for example, as little as 13 nt of homology, and thereby resulting in elevated potential for binding and double-strand nucleic acid cleavage by the CRISPR/Cas9 complex elsewhere in the target genome—also known as off-target cleavage. Because nickase variants of Cas9 each only cut one strand, in order to create a double-strand break it is necessary for a pair of nickases to bind in close proximity and on opposite strands of the target nucleic acid, thereby creating a pair of nicks, which is the equivalent of a double-strand break. This requires that two separate guide RNAs—one for each nickase—must bind in close proximity and on opposite strands of the target nucleic acid. This requirement essentially doubles the minimum length of homology needed for the double-strand break to occur, thereby reducing the likelihood that a double-strand cleavage event will occur elsewhere in the genome, where the two guide RNA sites—if they exist—are unlikely to be sufficiently close to each other to enable the double-strand break to form. As described in the art, nickases can also be used to promote HDR versus NHEJ. HDR can be used to introduce selected changes into target sites in the genome through the use of specific donor sequences that effectively mediate the desired changes.

[0165] Mutations contemplated can include substitutions, additions, and deletions, or any combination thereof. The mutation converts the mutated amino acid to alanine. The mutation converts the mutated amino acid to another amino acid (e.g., glycine, serine, threonine, cysteine, valine, leucine, isoleucine, methionine, proline, phenylalanine, tyrosine, tryptophan, aspartic acid, glutamic acid, asparagine, glutamine, histidine, lysine, or arginine). The mutation converts the mutated amino acid to a non-natural amino acid (e.g., selenomethionine). The mutation converts the mutated amino acid to amino acid mimics (e.g., phosphomimics). The mutation can be a conservative mutation. For example, the mutation converts the mutated amino acid to amino acids that resemble the size, shape, charge, polarity, conformation, and/or rotamers of the mutated amino acids (e.g., cysteine/serine mutation, lysine/asparagine mutation, histidine/phenylalanine mutation). The mutation can cause a shift in reading frame and/or the creation of a premature stop codon. Mutations can cause changes to regulatory regions of genes or loci that affect expression of one or more genes.

[0166] The site-directed polypeptide (e.g., variant, mutated, enzymatically inactive and/or conditionally enzymatically inactive site-directed polypeptide) can target nucleic acid. The site-directed polypeptide (e.g., variant, mutated, enzymatically inactive and/or conditionally enzymatically inactive endoribonuclease) can target DNA. The site-directed polypeptide (e.g., variant, mutated, enzymatically inactive and/or conditionally enzymatically inactive endoribonuclease) can target RNA.

[0167] The site-directed polypeptide can comprise one or more non-native sequences (e.g., the site-directed polypeptide is a fusion protein).

[0168] The site-directed polypeptide can comprise an amino acid sequence comprising at least 15% amino acid identity to a Cas9 from a bacterium (e.g., S. pyogenes), a nucleic acid binding domain, and two nucleic acid cleaving domains (i.e., a HNH domain and a RuvC domain).

[0169] The site-directed polypeptide can comprise an amino acid sequence comprising at least 15% amino acid identity to a Cas9 from a bacterium (e.g., S. pyogenes), and two nucleic acid cleaving domains (i.e., a HNH domain and a RuvC domain).

[0170] The site-directed polypeptide can comprise an amino acid sequence comprising at least 15% amino acid identity to a Cas9 from a bacterium (e.g., S. pyogenes), and two nucleic acid cleaving domains, wherein one or both of the nucleic acid cleaving domains comprise at least 50% amino acid identity to a nuclease domain from Cas9 from a bacterium (e.g., S. pyogenes).

[0171] The site-directed polypeptide can comprise an amino acid sequence comprising at least 15% amino acid identity to a Cas9 from a bacterium (e.g., S. pyogenes), two nucleic acid cleaving domains (i.e., a HNH domain and a RuvC domain), and non-native sequence (for example, a nuclear localization signal) or a linker linking the site-directed polypeptide to a non-native sequence.

[0172] The site-directed polypeptide can comprise an amino acid sequence comprising at least 15% amino acid identity to a Cas9 from a bacterium (e.g., S. pyogenes), two nucleic acid cleaving domains (i.e., a HNH domain and a RuvC domain), wherein the site-directed polypeptide comprises a mutation in one or both of the nucleic acid cleaving domains that reduces the cleaving activity of the nuclease domains by at least 50%.

[0173] The site-directed polypeptide can comprise an amino acid sequence comprising at least 15% amino acid identity to a Cas9 from a bacterium (e.g., S. pyogenes), and two nucleic acid cleaving domains (i.e., a HNH domain and a RuvC domain), wherein one of the nuclease domains comprises mutation of aspartic acid 10, and/or wherein one of the nuclease domains can comprise a mutation of histidine 840, and wherein the mutation reduces the cleaving activity of the nuclease domain(s) by at least 50%.

[0174] The one or more site-directed polypeptides, e.g. DNA endonucleases, can comprise two nickases that together effect one double-strand break at a specific locus in the genome, or four nickases that together effect or cause two double-strand breaks at specific loci in the genome. Alternatively, one site-directed polypeptide, e.g. DNA endonuclease, can effect or cause one double-strand break at a specific locus in the genome.

[0175] Non-limiting examples of Cas9 orthologs from other bacterial strains including but not limited to, Cas proteins identified in Acaryochloris marina MBIC11017; Acetohalobium arabaticum DSM 5501; Acidithiobacillus caldus; Acidithiobacillus ferrooxidans ATCC 23270; Alicyclobacillus acidocaldarius LAA1; Alicyclobacillus acidocaldarius subsp. acidocaldarius DSM 446; Allochromatium vinosum DSM 180; Ammonifex degensii KC4; Anabaena variabilis ATCC 29413; Arthrospira maxima CS-328; Arthrospira platensis str. Paraca; Arthrospira sp. PCC 8005; Bacillus pseudomycoides DSM 12442; Bacillus selenitireducens MLS10; Burkholderiales bacterium 1_1_47; Caldicelulosiruptor becscii DSM 6725; Candidatus Desulforudis audaxviator MP104C; Caldicellulosiruptor hydrothermalis_108; Clostridium phage c-st; Clostridium botulinum A3 str. Loch Maree; Clostridium botulinum Ba4 str. 657; Clostridium difficile QCD-63q42; Crocosphaera watsonii WH 8501; Cyanothece sp. ATCC 51142; Cyanothece sp. CCY0110; Cyanothece sp. PCC 7424; Cyanothece sp. PCC 7822; Exiguobacterium sibiricum 255-15; Finegoldia magna ATCC 29328; Ktedonobacter racemifer DSM 44963; Lactobacillus delbrueckii subsp. bulgaricus PB2003/044-T3-4; Lactobacillus salivarius ATCC 11741; Listeria innocua; Lyngbya sp. PCC 8106; Marinobacter sp. ELB17; Methanohalobium evestigatum Z-7303; Microcystis phage Ma-LMM01; Microcystis aeruginosa NIES-843; Microscilla marina ATCC 23134; Microcoleus chthonoplastes PCC 7420; Neisseria meningitidis; Nitrosococcus halophilus Nc4; Nocardiopsis dassonvillei subsp. dassonvillei DSM 43111; Nodularia spumigena CCY9414; Nostoc sp. PCC 7120; Oscillatoria sp. PCC 6506; Pelotomaculum thermopropionicum SI; Petrotoga mobilis SJ95; Polaromonas naphthalenivorans CJ2; Polaromonas sp. JS666; Pseudoalteromonas haloplanktis TAC125; Streptomyces pristinaespiralis ATCC 25486; Streptomyces pristinaespiralis ATCC 25486; Streptococcus thermophilus; Streptomyces viridochromogenes DSM 40736; Streptosporangium roseum DSM 43021; Synechococcus sp. PCC 7335; and Thermosipho africanus TCF52B (Chylinski et al., RNA Biol., 2013; 10(5): 726-737.

[0176] In addition to Cas9 orthologs, other Cas9 variants such as fusion proteins of inactive dCas9 and effector domains with different functions can be served as a platform for genetic modulation. Any of the foregoing enzymes can be useful in the present disclosure.

[0177] Further examples of endonucleases that can be utilized in the present disclosure are provided in SEQ ID NOs: 1-612. These proteins can be modified before use or can be encoded in a nucleic acid sequence such as a DNA, RNA or mRNA or within a vector construct such as the plasmids or adeno-associated virus (AAV) vectors taught herein. Further, they can be codon optimized.

[0178] Although nomenclature is used herein to indicate the species of origin for a given site-directed polypeptide, it is understood that the site-directed polypeptide and/or the nucleic acid encoding the site-directed polypeptide can be modified compared to the sequence occurring in the species of origin. For example, “SpCas9” indicates that the Cas9 gene/protein in question originated in Streptococcus pyogenes and was modified, such as by addition of NLS(s) and/or the performance of codon optimization. For example, “SaCas9” indicates that the Cas9 gene/protein in question originated in Staphylococcus aureus and was modified, such as by addition of NLS(s) and/or the performance of codon optimization.

### Genome-Targeting Nucleic Acid

[0179] The present disclosure provides a genome-targeting nucleic acid that can direct the activities of an associated polypeptide (e.g., a site-directed polypeptide) to a specific target sequence within a target nucleic acid. The genome-targeting nucleic acid can be an RNA. A genome-targeting RNA is referred to as a “guide RNA” or “gRNA” herein. A guide RNA can comprise at least a spacer sequence that hybridizes to a target nucleic acid sequence of interest, and a CRISPR repeat sequence. In Type II systems, the gRNA also comprises a second RNA called the tracrRNA sequence. In the Type II gRNA, the CRISPR repeat sequence and tracrRNA sequence hybridize to each other to form a duplex. In the Type V gRNA, the crRNA forms a duplex. In both systems, the duplex can bind a site-directed polypeptide, such that the guide RNA and site-direct polypeptide form a complex. The genome-targeting nucleic acid can provide target specificity to the complex by virtue of its association with the site-directed polypeptide. The genome-targeting nucleic acid thus can direct the activity of the site-directed polypeptide.

[0180] Exemplary guide RNAs include the spacer sequences in SEQ ID NOs: 5272-5314 of the Sequence Listing (FIG. 2A). The target DNA sequence (5′-3′) (SEQ ID NOs: 5315-5357) can be found in FIG. 2B. The reverse strand of target DNA sequence to which the sgRNA will bind (5′-3′) can be found in FIG. 2C.

[0181] Each guide RNA can be designed to include a spacer sequence complementary to its genomic target sequence. For example, each of the spacer sequences in SEQ ID NOs: 5272-5314 of the Sequence Listing can be put into a single RNA chimera or a crRNA (along with a corresponding tracrRNA). See Jinek et al., Science, 337, 816-821 (2012) and Deltcheva et al., Nature, 471, 602-607 (2011).

[0182] gRNAs or sgRNAs disclosed herein can associate with a DNA endonuclease to form a ribonucleoprotein complex, which can cause stable edits near the c.2299delG located in exon 13 of the USH2A gene. Changes in DNA sequences (e.g., edits) brought about by this editing can be non-transient.

[0183] The genome-targeting nucleic acid can be a double-molecule guide RNA (FIG. 1A). The genome-targeting nucleic acid can be a single-molecule guide RNA (FIG. 1B). The double-molecule guide RNA or single-molecule guide RNA can be modified.

[0184] A double-molecule guide RNA can comprise two strands of RNA. The first strand comprises in the 5′ to 3′ direction, an optional spacer extension sequence, a spacer sequence and a minimum CRISPR repeat sequence. The second strand can comprise a minimum tracrRNA sequence (complementary to the minimum CRISPR repeat sequence), a 3′ tracrRNA sequence and an optional tracrRNA extension sequence.

[0185] A single-molecule guide RNA (sgRNA) in a Type II system can comprise, in the 5′ to 3′ direction, an optional spacer extension sequence, a spacer sequence, a minimum CRISPR repeat sequence, a single-molecule guide linker, a minimum tracrRNA sequence, a 3′ tracrRNA sequence and an optional tracrRNA extension sequence. The optional tracrRNA extension can comprise elements that contribute additional functionality (e.g., stability) to the guide RNA. The single-molecule guide linker can link the minimum CRISPR repeat and the minimum tracrRNA sequence to form a hairpin structure. The optional tracrRNA extension can comprise one or more hairpins.

[0186] The sgRNA can comprise a 24 nucleotide spacer sequence at the 5′ end of the sgRNA sequence. The sgRNA can comprise a 23 nucleotide spacer sequence at the 5′ end of the sgRNA sequence. The sgRNA can comprise a 22 nucleotide spacer sequence at the 5′ end of the sgRNA sequence. The sgRNA can comprise a 21 nucleotide spacer sequence at the 5′ end of the sgRNA sequence. The sgRNA can comprise a 20 nucleotide spacer sequence at the 5′ end of the sgRNA sequence. The sgRNA can comprise a 19 nucleotide spacer sequence at the 5′ end of the sgRNA sequence. The sgRNA can comprise a 18 nucleotide spacer sequence at the 5′ end of the sgRNA sequence. The sgRNA can comprise a 17 nucleotide spacer sequence at the 5′ end of the sgRNA sequence. The sgRNA can comprise a 25 nucleotide spacer sequence at the 5′end of the sgRNA sequence. The sgRNA can comprise a 26 nucleotide spacer sequence at the 5′end of the sgRNA sequence. The sgRNA can comprise a 27 nucleotide spacer sequence at the 5′end of the sgRNA sequence. The sgRNA can comprise a 28 nucleotide spacer sequence at the 5′end of the sgRNA sequence. The sgRNA can comprise a 29 nucleotide spacer sequence at the 5′end of the sgRNA sequence. The sgRNA can comprise a 30 nucleotide spacer sequence at the 5′ end of the sgRNA sequence. The sgRNA can comprise a less than a 20 nucleotide spacer sequence at the 5′ end of the sgRNA sequence. The sgRNA can comprise a more than 20 nucleotide spacer sequence at the 5′ end of the sgRNA sequence. The sgRNA can comprise a variable length spacer sequence with 17-24 nucleotides at the 5′ end of the sgRNA sequence. The sgRNA can comprise a variable length spacer sequence with 17-30 nucleotides at the 5′ end of the sgRNA sequence (see Table 2).

[0187] The sgRNA can comprise no uracil at the 3′end of the sgRNA sequence, such as in SEQ ID NO: 5268 of Table 2. The sgRNA can comprise one or more uracil at the 3′end of the sgRNA sequence, such as in SEQ ID NO: 5269 in Table 2. For example, the sgRNA can comprise 1 uracil (U) at the 3′ end of the sgRNA sequence. The sgRNA can comprise 2 uracil (UU) at the 3′ end of the sgRNA sequence. The sgRNA can comprise 3 uracil (UUU) at the 3′ end of the sgRNA sequence. The sgRNA can comprise 4 uracil (UUUU) at the 3′ end of the sgRNA sequence. The sgRNA can comprise 5 uracil (UUUUU) at the 3′ end of the sgRNA sequence. The sgRNA can comprise 6 uracil (UUUUUU) at the 3′ end of the sgRNA sequence. The sgRNA can comprise 7 uracil (UUUUUUU) at the 3′ end of the sgRNA sequence. The sgRNA can comprise 8 uracil (UUUUUUUU) at the 3′ end of the sgRNA sequence.

[0188] The sgRNA can be unmodified or modified. For example, modified sgRNAs can comprise one or more 2′-O-methyl phosphorothioate nucleotides.

TABLE 2

| SEQ ID NO. | sgRNA sequence |
|---|---|
| 5267 | nnnnnnnnnnnnnnnnnnnnguuuuagagcuagaaaua |
| | gcaaguuaaaauaaggcuaguccguuaucaacuugaaa |
| | aaguggcaccgagucggugcuuuu |
| 5268 | nnnnnnnnnnnnnnnnnnnnguuuuagagcuagaaaua |
| | gcaaguuaaaauaaggcuaguccguuaucaacuugaaa |
| | aaguggcaccgagucggugc |
| 5269 | n₍₁₇₋₃₀₎guuuuagagcuagaaauagcaaguuaaaauaag |
| | gcuaguccguuaucaacuugaaaaaguggcaccgaguc |
| | ggugcu₍₁₋₈₎ |

[0189] A single-molecule guide RNA (sgRNA) in a Type V system can comprise, in the 5′ to 3′ direction, a minimum CRISPR repeat sequence and a spacer sequence.

[0190] By way of illustration, guide RNAs used in the CRISPR/Cas/Cpf1 system, or other smaller RNAs can be readily synthesized by chemical means, as illustrated below and described in the art. While chemical synthetic procedures are continually expanding, purifications of such RNAs by procedures such as high performance liquid chromatography (HPLC, which avoids the use of gels such as PAGE) tends to become more challenging as polynucleotide lengths increase significantly beyond a hundred or so nucleotides. One approach used for generating RNAs of greater length is to produce two or more molecules that are ligated together. Much longer RNAs, such as those encoding a Cas9 or Cpf1 endonuclease, are more readily generated enzymatically. Various types of RNA modifications can be introduced during or after chemical synthesis and/or enzymatic generation of RNAs, e.g., modifications that enhance stability, reduce the likelihood or degree of innate immune response, and/or enhance other attributes, as described in the art.

### Spacer Extension Sequence

[0191] In some examples of genome-targeting nucleic acids, a spacer extension sequence can modify activity, provide stability and/or provide a location for modifications of a genome-targeting nucleic acid. A spacer extension sequence can modify on- or off-target activity or specificity. In some examples, a spacer extension sequence can be provided. The spacer extension sequence can have a length of more than 1, 5, 10, 15, 20, 25, 30, 35, 40, 45, 50, 60, 70, 80, 90, 100, 120, 140, 160, 180, 200, 220, 240, 260, 280, 300, 320, 340, 360, 380, 400, 1000, 2000, 3000, 4000, 5000, 6000, or 7000 or more nucleotides. The spacer extension sequence can have a length of less than 1, 5, 10, 15, 20, 25, 30, 35, 40, 45, 50, 60, 70, 80, 90, 100, 120, 140, 160, 180, 200, 220, 240, 260, 280, 300, 320, 340, 360, 380, 400, 1000, 2000, 3000, 4000, 5000, 6000, 7000 or more nucleotides. The spacer extension sequence can be less than 10 nucleotides in length. The spacer extension sequence can be between 10-30 nucleotides in length. The spacer extension sequence can be between 30-70 nucleotides in length.

[0192] The spacer extension sequence can comprise another moiety (e.g., a stability control sequence, an endoribonuclease binding sequence, a ribozyme). The moiety can decrease or increase the stability of a nucleic acid targeting nucleic acid. The moiety can be a transcriptional terminator segment (i.e., a transcription termination sequence). The moiety can function in a eukaryotic cell. The moiety can function in a prokaryotic cell. The moiety can function in both eukaryotic and prokaryotic cells. Non-limiting examples of suitable moieties include: a 5′ cap (e.g., a 7-methylguanylate cap (m7 G)), a riboswitch sequence (e.g., to allow for regulated stability and/or regulated accessibility by proteins and protein complexes), a sequence that forms a dsRNA duplex (i.e., a hairpin), a sequence that targets the RNA to a subcellular location (e.g., nucleus, mitochondria, chloroplasts, and the like), a modification or sequence that provides for tracking (e.g., direct conjugation to a fluorescent molecule, conjugation to a moiety that facilitates fluorescent detection, a sequence that allows for fluorescent detection, etc.), and/or a modification or sequence that provides a binding site for proteins (e.g., proteins that act on DNA, including transcriptional activators, transcriptional repressors, DNA methyltransferases, DNA demethylases, histone acetyltransferases, histone deacetylases, and the like).

### Spacer Sequence

[0193] The spacer sequence hybridizes to a sequence in a target nucleic acid of interest. The spacer of a genome-targeting nucleic acid can interact with a target nucleic acid in a sequence-specific manner via hybridization (i.e., base pairing). The nucleotide sequence of the spacer can vary depending on the sequence of the target nucleic acid of interest.

[0194] In a CRISPR/Cas system herein, the spacer sequence can be designed to hybridize to a target nucleic acid that is located 5′ of a PAM of the Cas9 enzyme used in the system. The spacer can perfectly match the target sequence or can have mismatches. Each Cas9 enzyme has a particular PAM sequence that it recognizes in a target DNA. For example, S. pyogenes recognizes in a target nucleic acid a PAM that comprises the sequence 5′-NRG-3′, where R comprises either A or G, where N is any nucleotide and N is immediately 3′ of the target nucleic acid sequence targeted by the spacer sequence. For example, S. aureus Cas9 recognizes in a target nucleic acid a PAM that comprises the sequence 5′-NNGRRT-3′, where R comprises either A or G, where N is any nucleotide and N is immediately 3′ of the target nucleic acid sequence targeted by the spacer sequence. In certain examples, S. aureus Cas9 recognizes in a target nucleic acid a PAM that comprises the sequence 5′-NNGRRN-3′, where R comprises either A or G, where N is any nucleotide and the N is immediately 3′ of the target nucleic acid sequence targeted by the spacer sequence. For example, C. jejuni recognizes in a target nucleic acid a PAM that comprises the sequence 5′-NNNNACA-3′ or 5′-NNNNACAC-3′, where N is any nucleotide and N is immediately 3′ of the target nucleic acid sequence targeted by the spacer sequence. In certain examples, C. jejuni Cas9 recognizes in a target nucleic acid a PAM that comprises the sequence 5′-NNNVRYM-3′ or 5′-NNVRYAC-3′, where V comprises either A, G or C, where R comprises either A or G, where Y comprises either C or T, where M comprises A or C, where N is any nucleotide and the N is immediately 3′ of the target nucleic acid sequence targeted by the spacer sequence.

[0195] The target nucleic acid sequence can comprise 20 nucleotides. The target nucleic acid can comprise less than 20 nucleotides. The target nucleic acid can comprise more than 20 nucleotides. The target nucleic acid can comprise at least: 5, 10, 15, 16, 17, 18, 19, 20, 21, 22, 23, 24, 25, 30 or more nucleotides. The target nucleic acid can comprise at most: 5, 10, 15, 16, 17, 18, 19, 20, 21, 22, 23, 24, 25, 30 or more nucleotides. The target nucleic acid sequence can comprise 20 bases immediately 5′ of the first nucleotide of the PAM. For example, in a sequence comprising 5′-NNNNNNNNNNNNNNNNNNNNNRG-3′ (SEQ ID NO: 5270), the target nucleic acid can comprise the sequence that corresponds to the Ns, wherein N is any nucleotide, and the underlined NRG sequence is the S. pyogenes PAM.

[0196] The spacer sequence that hybridizes to the target nucleic acid can have a length of at least about 6 nucleotides (nt). The spacer sequence can be at least about 6 nt, at least about 10 nt, at least about 15 nt, at least about 18 nt, at least about 19 nt, at least about 20 nt, at least about 25 nt, at least about 30 nt, at least about 35 nt or at least about 40 nt, from about 6 nt to about 80 nt, from about 6 nt to about 50 nt, from about 6 nt to about 45 nt, from about 6 nt to about 40 nt, from about 6 nt to about 35 nt, from about 6 nt to about 30 nt, from about 6 nt to about 25 nt, from about 6 nt to about 20 nt, from about 6 nt to about 19 nt, from about 10 nt to about 50 nt, from about 10 nt to about 45 nt, from about 10 nt to about 40 nt, from about 10 nt to about 35 nt, from about 10 nt to about 30 nt, from about 10 nt to about 25 nt, from about 10 nt to about 20 nt, from about 10 nt to about 19 nt, from about 19 nt to about 25 nt, from about 19 nt to about 30 nt, from about 19 nt to about 35 nt, from about 19 nt to about 40 nt, from about 19 nt to about 45 nt, from about 19 nt to about 50 nt, from about 19 nt to about 60 nt, from about 20 nt to about 25 nt, from about 20 nt to about 30 nt, from about 20 nt to about 35 nt, from about 20 nt to about 40 nt, from about 20 nt to about 45 nt, from about 20 nt to about 50 nt, or from about 20 nt to about 60 nt. In some examples, the spacer sequence can comprise 24 nucleotides. In some examples, the spacer sequence can comprise 23 nucleotides. In some examples, the spacer sequence can comprise 22 nucleotides. In some examples, the spacer sequence can comprise 21 nucleotides. In some examples, the spacer sequence can comprise 20 nucleotides. In some examples, the spacer sequence can comprise 19 nucleotides. In some examples, the spacer sequence can comprise 18 nucleotides. In some examples, the spacer sequence can comprise 17 nucleotides.

[0197] In some examples, the percent complementarity between the spacer sequence and the target nucleic acid is at least about 30%, at least about 40%, at least about 50%, at least about 60%, at least about 65%, at least about 70%, at least about 75%, at least about 80%, at least about 85%, at least about 90%, at least about 95%, at least about 97%, at least about 98%, at least about 99%, or 100%. In some examples, the percent complementarity between the spacer sequence and the target nucleic acid is at most about 30%, at most about 40%, at most about 50%, at most about 60%, at most about 65%, at most about 70%, at most about 75%, at most about 80%, at most about 85%, at most about 90%, at most about 95%, at most about 97%, at most about 98%, at most about 99%, or 100%. In some examples, the percent complementarity between the spacer sequence and the target nucleic acid is 100% over the six contiguous 5′-most nucleotides of the target sequence of the complementary strand of the target nucleic acid. The percent complementarity between the spacer sequence and the target nucleic acid can be at least 60% over about 20 contiguous nucleotides. The length of the spacer sequence and the target nucleic acid can differ by 1 to 6 nucleotides, which can be thought of as a bulge or bulges.

[0198] The spacer sequence can be designed or chosen using a computer program. The computer program can use variables, such as predicted melting temperature, secondary structure formation, predicted annealing temperature, sequence identity, genomic context, chromatin accessibility, % GC, frequency of genomic occurrence (e.g., of sequences that are identical or are similar but vary in one or more spots as a result of mismatch, insertion or deletion), methylation status, presence of SNPs, and the like.

### Minimum CRISPR Repeat Sequence

[0199] A minimum CRISPR repeat sequence can be a sequence with at least about 30%, about 40%, about 50%, about 60%, about 65%, about 70%, about 75%, about 80%, about 85%, about 90%, about 95%, or 100% sequence identity to a reference CRISPR repeat sequence (e.g., crRNA from S. pyogenes).

[0200] A minimum CRISPR repeat sequence can comprise nucleotides that can hybridize to a minimum tracrRNA sequence in a cell. The minimum CRISPR repeat sequence and a minimum tracrRNA sequence can form a duplex, i.e. a base-paired double-stranded structure. Together, the minimum CRISPR repeat sequence and the minimum tracrRNA sequence can bind to the site-directed polypeptide. At least a part of the minimum CRISPR repeat sequence can hybridize to the minimum tracrRNA sequence. At least a part of the minimum CRISPR repeat sequence can comprise at least about 30%, about 40%, about 50%, about 60%, about 65%, about 70%, about 75%, about 80%, about 85%, about 90%, about 95%, or 100% complementary to the minimum tracrRNA sequence. At least a part of the minimum CRISPR repeat sequence can comprise at most about 30%, about 40%, about 50%, about 60%, about 65%, about 70%, about 75%, about 80%, about 85%, about 90%, about 95%, or 100% complementary to the minimum tracrRNA sequence.

[0201] The minimum CRISPR repeat sequence can have a length from about 7 nucleotides to about 100 nucleotides. For example, the length of the minimum CRISPR repeat sequence is from about 7 nucleotides (nt) to about 50 nt, from about 7 nt to about 40 nt, from about 7 nt to about 30 nt, from about 7 nt to about 25 nt, from about 7 nt to about 20 nt, from about 7 nt to about 15 nt, from about 8 nt to about 40 nt, from about 8 nt to about 30 nt, from about 8 nt to about 25 nt, from about 8 nt to about 20 nt, from about 8 nt to about 15 nt, from about 15 nt to about 100 nt, from about 15 nt to about 80 nt, from about 15 nt to about 50 nt, from about 15 nt to about 40 nt, from about 15 nt to about 30 nt, or from about 15 nt to about 25 nt. In some examples, the minimum CRISPR repeat sequence can be approximately 9 nucleotides in length. The minimum CRISPR repeat sequence can be approximately 12 nucleotides in length.

[0202] The minimum CRISPR repeat sequence can be at least about 60% identical to a reference minimum CRISPR repeat sequence (e.g., wild-type crRNA from S. pyogenes) over a stretch of at least 6, 7, or 8 contiguous nucleotides. For example, the minimum CRISPR repeat sequence can be at least about 65% identical, at least about 70% identical, at least about 75% identical, at least about 80% identical, at least about 85% identical, at least about 90% identical, at least about 95% identical, at least about 98% identical, at least about 99% identical or 100% identical to a reference minimum CRISPR repeat sequence over a stretch of at least 6, 7, or 8 contiguous nucleotides.

Minimum tracrRNA Sequence

[0203] A minimum tracrRNA sequence can be a sequence with at least about 30%, about 40%, about 50%, about 60%, about 65%, about 70%, about 75%, about 80%, about 85%, about 90%, about 95%, or 100% sequence identity to a reference tracrRNA sequence (e.g., wild type tracrRNA from S. pyogenes).

[0204] A minimum tracrRNA sequence can comprise nucleotides that hybridize to a minimum CRISPR repeat sequence in a cell. A minimum tracrRNA sequence and a minimum CRISPR repeat sequence form a duplex, i.e. a base-paired double-stranded structure. Together, the minimum tracrRNA sequence and the minimum CRISPR repeat can bind to a site-directed polypeptide. At least a part of the minimum tracrRNA sequence can hybridize to the minimum CRISPR repeat sequence. The minimum tracrRNA sequence can be at least about 30%, about 40%, about 50%, about 60%, about 65%, about 70%, about 75%, about 80%, about 85%, about 90%, about 95%, or 100% complementary to the minimum CRISPR repeat sequence.

[0205] The minimum tracrRNA sequence can have a length from about 7 nucleotides to about 100 nucleotides. For example, the minimum tracrRNA sequence can be from about 7 nucleotides (nt) to about 50 nt, from about 7 nt to about 40 nt, from about 7 nt to about 30 nt, from about 7 nt to about 25 nt, from about 7 nt to about 20 nt, from about 7 nt to about 15 nt, from about 8 nt to about 40 nt, from about 8 nt to about 30 nt, from about 8 nt to about 25 nt, from about 8 nt to about 20 nt, from about 8 nt to about 15 nt, from about 15 nt to about 100 nt, from about 15 nt to about 80 nt, from about 15 nt to about 50 nt, from about 15 nt to about 40 nt, from about 15 nt to about 30 nt or from about 15 nt to about 25 nt long. The minimum tracrRNA sequence can be approximately 9 nucleotides in length. The minimum tracrRNA sequence can be approximately 12 nucleotides. The minimum tracrRNA can consist of tracrRNA nt 23-48 described in Jinek et al., supra.

[0206] The minimum tracrRNA sequence can be at least about 60% identical to a reference minimum tracrRNA (e.g., wild type, tracrRNA from S. pyogenes) sequence over a stretch of at least 6, 7, or 8 contiguous nucleotides. For example, the minimum tracrRNA sequence can be at least about 65% identical, about 70% identical, about 75% identical, about 80% identical, about 85% identical, about 90% identical, about 95% identical, about 98% identical, about 99% identical or 100% identical to a reference minimum tracrRNA sequence over a stretch of at least 6, 7, or 8 contiguous nucleotides.

[0207] The duplex between the minimum CRISPR RNA and the minimum tracrRNA can comprise a double helix. The duplex between the minimum CRISPR RNA and the minimum tracrRNA can comprise at least about 1, 2, 3, 4, 5, 6, 7, 8, 9, or 10 or more nucleotides. The duplex between the minimum CRISPR RNA and the minimum tracrRNA can comprise at most about 1, 2, 3, 4, 5, 6, 7, 8, 9, or 10 or more nucleotides.

[0208] The duplex can comprise a mismatch (i.e., the two strands of the duplex are not 100% complementary). The duplex can comprise at least about 1, 2, 3, 4, or 5 or mismatches. The duplex can comprise at most about 1, 2, 3, 4, or 5 or mismatches. The duplex can comprise no more than 2 mismatches.

### Bulges

[0209] In some cases, there can be a “bulge” in the duplex between the minimum CRISPR RNA and the minimum tracrRNA. A bulge is an unpaired region of nucleotides within the duplex. A bulge can contribute to the binding of the duplex to the site-directed polypeptide. The bulge can comprise, on one side of the duplex, an unpaired 5′-XXXY-3′ where X is any purine and Y comprises a nucleotide that can form a wobble pair with a nucleotide on the opposite strand, and an unpaired nucleotide region on the other side of the duplex. The number of unpaired nucleotides on the two sides of the duplex can be different.

[0210] In one example, the bulge can comprise an unpaired purine (e.g., adenine) on the minimum CRISPR repeat strand of the bulge. In some examples, the bulge can comprise an unpaired 5′-AAGY-3′ of the minimum tracrRNA sequence strand of the bulge, where Y comprises a nucleotide that can form a wobble pairing with a nucleotide on the minimum CRISPR repeat strand.

[0211] A bulge on the minimum CRISPR repeat side of the duplex can comprise at least 1, 2, 3, 4, or 5 or more unpaired nucleotides. A bulge on the minimum CRISPR repeat side of the duplex can comprise at most 1, 2, 3, 4, or 5 or more unpaired nucleotides. A bulge on the minimum CRISPR repeat side of the duplex can comprise 1 unpaired nucleotide.

[0212] A bulge on the minimum tracrRNA sequence side of the duplex can comprise at least 1, 2, 3, 4, 5, 6, 7, 8, 9, or 10 or more unpaired nucleotides. A bulge on the minimum tracrRNA sequence side of the duplex can comprise at most 1, 2, 3, 4, 5, 6, 7, 8, 9, or 10 or more unpaired nucleotides. A bulge on a second side of the duplex (e.g., the minimum tracrRNA sequence side of the duplex) can comprise 4 unpaired nucleotides.

[0213] A bulge can comprise at least one wobble pairing. In some examples, a bulge can comprise at most one wobble pairing. A bulge can comprise at least one purine nucleotide. A bulge can comprise at least 3 purine nucleotides. A bulge sequence can comprise at least 5 purine nucleotides. A bulge sequence can comprise at least one guanine nucleotide. In some examples, a bulge sequence can comprise at least one adenine nucleotide.

### Hairpins

[0214] In various examples, one or more hairpins can be located 3′ to the minimum tracrRNA in the 3′ tracrRNA sequence.

[0215] The hairpin can start at least about 1, 2, 3, 4, 5, 6, 7, 8, 9, 10, 15, or 20 or more nucleotides 3′ from the last paired nucleotide in the minimum CRISPR repeat and minimum tracrRNA sequence duplex. The hairpin can start at most about 1, 2, 3, 4, 5, 6, 7, 8, 9 or 10 or more nucleotides 3′ of the last paired nucleotide in the minimum CRISPR repeat and minimum tracrRNA sequence duplex.

[0216] The hairpin can comprise at least about 1, 2, 3, 4, 5, 6, 7, 8, 9, 10, 15, or 20 or more consecutive nucleotides. The hairpin can comprise at most about 1, 2, 3, 4, 5, 6, 7, 8, 9, 10, 15, or more consecutive nucleotides.

[0217] The hairpin can comprise a CC dinucleotide (i.e., two consecutive cytosine nucleotides).

[0218] The hairpin can comprise duplexed nucleotides (e.g., nucleotides in a hairpin, hybridized together). For example, a hairpin can comprise a CC dinucleotide that is hybridized to a GG dinucleotide in a hairpin duplex of the 3′ tracrRNA sequence.

[0219] One or more of the hairpins can interact with guide RNA-interacting regions of a site-directed polypeptide.

[0220] In some examples, there are two or more hairpins, and in other examples there are three or more hairpins.

3′ tracrRNA Sequence

[0221] A 3′ tracrRNA sequence can comprise a sequence with at least about 30%, about 40%, about 50%, about 60%, about 65%, about 70%, about 75%, about 80%, about 85%, about 90%, about 95%, or 100% sequence identity to a reference tracrRNA sequence (e.g., a tracrRNA from S. pyogenes).

[0222] The 3′ tracrRNA sequence can have a length from about 6 nucleotides to about 100 nucleotides. For example, the 3′ tracrRNA sequence can have a length from about 6 nucleotides (nt) to about 50 nt, from about 6 nt to about 40 nt, from about 6 nt to about 30 nt, from about 6 nt to about 25 nt, from about 6 nt to about 20 nt, from about 6 nt to about 15 nt, from about 8 nt to about 40 nt, from about 8 nt to about 30 nt, from about 8 nt to about 25 nt, from about 8 nt to about 20 nt, from about 8 nt to about 15 nt, from about 15 nt to about 100 nt, from about 15 nt to about 80 nt, from about 15 nt to about 50 nt, from about 15 nt to about 40 nt, from about 15 nt to about 30 nt, or from about 15 nt to about 25 nt. The 3′ tracrRNA sequence can have a length of approximately 14 nucleotides.

[0223] The 3′ tracrRNA sequence can be at least about 60% identical to a reference 3′ tracrRNA sequence (e.g., wild type 3′ tracrRNA sequence from S. pyogenes) over a stretch of at least 6, 7, or 8 contiguous nucleotides. For example, the 3′ tracrRNA sequence can be at least about 60% identical, about 65% identical, about 70% identical, about 75% identical, about 80% identical, about 85% identical, about 90% identical, about 95% identical, about 98% identical, about 99% identical, or 100% identical, to a reference 3′ tracrRNA sequence (e.g., wild type 3′ tracrRNA sequence from S. pyogenes) over a stretch of at least 6, 7, or 8 contiguous nucleotides.

[0224] The 3′ tracrRNA sequence can comprise more than one duplexed region (e.g., hairpin, hybridized region). The 3′ tracrRNA sequence can comprise two duplexed regions.

[0225] The 3′ tracrRNA sequence can comprise a stem loop structure. The stem loop structure in the 3′ tracrRNA can comprise at least 1, 2, 3, 4, 5, 6, 7, 8, 9, 10, 15 or 20 or more nucleotides. The stem loop structure in the 3′ tracrRNA can comprise at most 1, 2, 3, 4, 5, 6, 7, 8, 9 or 10 or more nucleotides. The stem loop structure can comprise a functional moiety. For example, the stem loop structure can comprise an aptamer, a ribozyme, a protein-interacting hairpin, a CRISPR array, an intron, or an exon. The stem loop structure can comprise at least about 1, 2, 3, 4, or 5 or more functional moieties. The stem loop structure can comprise at most about 1, 2, 3, 4, or 5 or more functional moieties.

[0226] The hairpin in the 3′ tracrRNA sequence can comprise a P-domain. In some examples, the P-domain can comprise a double-stranded region in the hairpin.

tracrRNA Extension Sequence

[0227] A tracrRNA extension sequence can be provided whether the tracrRNA is in the context of single-molecule guides or double-molecule guides. The tracrRNA extension sequence can have a length from about 1 nucleotide to about 400 nucleotides. The tracrRNA extension sequence can have a length of more than 1, 5, 10, 15, 20, 25, 30, 35, 40, 45, 50, 60, 70, 80, 90, 100, 120, 140, 160, 180, 200, 220, 240, 260, 280, 300, 320, 340, 360, 380, or 400 nucleotides. The tracrRNA extension sequence can have a length from about 20 to about 5000 or more nucleotides. The tracrRNA extension sequence can have a length of more than 1000 nucleotides. The tracrRNA extension sequence can have a length of less than 1, 5, 10, 15, 20, 25, 30, 35, 40, 45, 50, 60, 70, 80, 90, 100, 120, 140, 160, 180, 200, 220, 240, 260, 280, 300, 320, 340, 360, 380, 400 or more nucleotides. The tracrRNA extension sequence can have a length of less than 1000 nucleotides. The tracrRNA extension sequence can comprise less than 10 nucleotides in length. The tracrRNA extension sequence can be 10-30 nucleotides in length. The tracrRNA extension sequence can be 30-70 nucleotides in length.

[0228] The tracrRNA extension sequence can comprise a functional moiety (e.g., a stability control sequence, ribozyme, endoribonuclease binding sequence). The functional moiety can comprise a transcriptional terminator segment (i.e., a transcription termination sequence). The functional moiety can have a total length from about 10 nucleotides (nt) to about 100 nucleotides, from about 10 nt to about 20 nt, from about 20 nt to about 30 nt, from about 30 nt to about 40 nt, from about 40 nt to about 50 nt, from about 50 nt to about 60 nt, from about 60 nt to about 70 nt, from about 70 nt to about 80 nt, from about 80 nt to about 90 nt, or from about 90 nt to about 100 nt, from about 15 nt to about 80 nt, from about 15 nt to about 50 nt, from about 15 nt to about 40 nt, from about 15 nt to about 30 nt, or from about 15 nt to about 25 nt. The functional moiety can function in a eukaryotic cell. The functional moiety can function in a prokaryotic cell. The functional moiety can function in both eukaryotic and prokaryotic cells.

[0229] Non-limiting examples of suitable tracrRNA extension functional moieties include a 3′ poly-adenylated tail, a riboswitch sequence (e.g., to allow for regulated stability and/or regulated accessibility by proteins and protein complexes), a sequence that forms a dsRNA duplex (i.e., a hairpin), a sequence that targets the RNA to a subcellular location (e.g., nucleus, mitochondria, chloroplasts, and the like), a modification or sequence that provides for tracking (e.g., direct conjugation to a fluorescent molecule, conjugation to a moiety that facilitates fluorescent detection, a sequence that allows for fluorescent detection, etc.), and/or a modification or sequence that provides a binding site for proteins (e.g., proteins that act on DNA, including transcriptional activators, transcriptional repressors, DNA methyltransferases, DNA demethylases, histone acetyltransferases, histone deacetylases, and the like). The tracrRNA extension sequence can comprise a primer binding site or a molecular index (e.g., barcode sequence). The tracrRNA extension sequence can comprise one or more affinity tags.

### Single-Molecule Guide Linker Sequence

[0230] The linker sequence of a single-molecule guide nucleic acid can have a length from about 3 nucleotides to about 100 nucleotides. In Jinek et al., supra, for example, a simple 4 nucleotide “tetraloop” (-GAAA-) was used, Science, 337(6096):816-821 (2012). An illustrative linker has a length from about 3 nucleotides (nt) to about 90 nt, from about 3 nt to about 80 nt, from about 3 nt to about 70 nt, from about 3 nt to about 60 nt, from about 3 nt to about 50 nt, from about 3 nt to about 40 nt, from about 3 nt to about 30 nt, from about 3 nt to about 20 nt, from about 3 nt to about 10 nt. For example, the linker can have a length from about 3 nt to about 5 nt, from about 5 nt to about 10 nt, from about 10 nt to about 15 nt, from about 15 nt to about 20 nt, from about 20 nt to about 25 nt, from about 25 nt to about 30 nt, from about 30 nt to about 35 nt, from about 35 nt to about 40 nt, from about 40 nt to about 50 nt, from about 50 nt to about 60 nt, from about 60 nt to about 70 nt, from about 70 nt to about 80 nt, from about 80 nt to about 90 nt, or from about 90 nt to about 100 nt. The linker of a single-molecule guide nucleic acid can be between 4 and 40 nucleotides. The linker can be at least about 100, 500, 1000, 1500, 2000, 2500, 3000, 3500, 4000, 4500, 5000, 5500, 6000, 6500, or 7000 or more nucleotides. The linker can be at most about 100, 500, 1000, 1500, 2000, 2500, 3000, 3500, 4000, 4500, 5000, 5500, 6000, 6500, or 7000 or more nucleotides.

[0231] Linkers can comprise any of a variety of sequences, although in some examples the linker will not comprise sequences that have extensive regions of homology with other portions of the guide RNA, which might cause intramolecular binding that could interfere with other functional regions of the guide. In Jinek et al., supra, a simple 4 nucleotide sequence -GAAA- was used, Science, 337(6096):816-821 (2012), but numerous other sequences, including longer sequences can likewise be used.

[0232] The linker sequence can comprise a functional moiety. For example, the linker sequence can comprise one or more features, including an aptamer, a ribozyme, a protein-interacting hairpin, a protein binding site, a CRISPR array, an intron, or an exon. The linker sequence can comprise at least about 1, 2, 3, 4, or 5 or more functional moieties. In some examples, the linker sequence can comprise at most about 1, 2, 3, 4, or 5 or more functional moieties.

### Complexes of a Genome-Targeting Nucleic Acid and a Site-Directed Polypeptide

[0233] A genome-targeting nucleic acid interacts with a site-directed polypeptide (e.g., a nucleic acid-guided nuclease such as Cas9), thereby forming a complex. The genome-targeting nucleic acid guides the site-directed polypeptide to a target nucleic acid.

### Ribonucleoprotein Complexes (RNPs)

[0234] The site-directed polypeptide and genome-targeting nucleic acid can each be administered separately to a cell or a patient. On the other hand, the site-directed polypeptide can be pre-complexed with one or more guide RNAs, or one or more crRNA together with a tracrRNA. The site-directed polypeptide can be pre-complexed with one or more sgRNA. The pre-complexed material can then be administered to a cell or a patient. Such pre-complexed material is known as a ribonucleoprotein particle (RNP). The site-directed polypeptide in the RNP can be, for example, a Cas9 endonuclease or a Cpf1 endonuclease. The site-directed polypeptide can be flanked at the N-terminus, the C-terminus, or both the N-terminus and C-terminus by one or more nuclear localization signals (NLSs). For example, a Cas9 endonuclease can be flanked by two NLSs, one NLS located at the N-terminus and the second NLS located at the C-terminus. The NLS can be any NLS known in the art, such as a SV40 NLS. The weight ratio of genome-targeting nucleic acid to site-directed polypeptide in the RNP can be 1:1. For example, the weight ratio of sgRNA to Cas9 endonuclease in the RNP can be 1:1.

### Target Sequence Selection

[0235] Shifts in the location of the 5′ boundary and/or the 3′ boundary relative to particular reference loci can be used to facilitate or enhance particular applications of gene editing, which depend in part on the endonuclease system selected for the editing, as further described and illustrated herein.

[0236] In a first non-limiting example of such target sequence selection, many endonuclease systems have rules or criteria that can guide the initial selection of potential target sites for cleavage, such as the requirement of a PAM sequence motif in a particular position adjacent to the DNA cleavage sites in the case of CRISPR Type II or Type V endonucleases.

[0237] In another nonlimiting example of target sequence selection or optimization, the frequency of off-target activity for a particular combination of target sequence and gene editing endonuclease can be assessed relative to the frequency of on-target activity. In some cases, cells that have been correctly edited at the desired locus can have a selective advantage relative to other cells. Illustrative, but nonlimiting, examples of a selective advantage include the acquisition of attributes such as enhanced rates of replication, persistence, resistance to certain conditions, enhanced rates of successful engraftment or persistence in vivo following introduction into a patient, and other attributes associated with the maintenance or increased numbers or viability of such cells. In other cases, cells that have been correctly edited at the desired locus can be positively selected for by one or more screening methods used to identify, sort or otherwise select for cells that have been correctly edited. Both selective advantage and directed selection methods can take advantage of the phenotype associated with the correction. In some cases, cells can be edited two or more times in order to create a second modification that creates a new phenotype that is used to select or purify the intended population of cells. Such a second modification could be created by adding a second gRNA for a selectable or screenable marker. In some cases, cells can be correctly edited at the desired locus using a DNA fragment that contains the cDNA and also a selectable marker.

[0238] Whether any selective advantage is applicable or any directed selection is to be applied in a particular case, target sequence selection can also be guided by consideration of off-target frequencies in order to enhance the effectiveness of the application and/or reduce the potential for undesired alterations at sites other than the desired target. As described further and illustrated herein and in the art, the occurrence of off-target activity can be influenced by a number of factors including similarities and dissimilarities between the target site and various off-target sites, as well as the particular endonuclease used. Bioinformatics tools are available that assist in the prediction of off-target activity, and frequently such tools can also be used to identify the most likely sites of off-target activity, which can then be assessed in experimental settings to evaluate relative frequencies of off-target to on-target activity, thereby allowing the selection of sequences that have higher relative on-target activities. Illustrative examples of such techniques are provided herein, and others are known in the art.

[0239] gRNAs of the present disclosure can direct editing at a genetic locus where editing is desired (e.g., near the c.2299delG located in exon 13 of the USH2A gene). As used herein, “on-target editing,” “on-target activity,” or “on-target cleavage” means editing at a genetic location where editing is desired. gRNAs disclosed herein can have on-target activity when the gRNA directs editing at a genetic location near the c.2299delG located in exon 13 of the USH2A gene.

[0240] gRNAs of the present disclosure can also direct editing at a genetic locus where editing is not desired. As used herein, “off-target editing,” “off-target activity,” or “off-target cleavage” means editing at a genetic locus where editing is not desired.

[0241] Off-target editing can be editing of a second gene or locus (e.g., editing of a genomic sequence that is not a sequence of the USH2A gene or a regulatory sequence of the USH2A gene). Herein, this type of off-target editing is termed “genomic off-target editing,” “genomic off-target activity,” or “genomic off-target cleavage.” gRNAs disclosed herein have genomic off-target activity when the gRNA directs editing of a genomic sequence that is not a sequence of the USH2A gene or a regulatory sequence of the USH2A gene.

[0242] In some examples, genomic off-target activity of a gRNA can be “minimal.” gRNAs with minimal genomic off-target activity can be determined based on in silico analysis, in vitro methods, or in vivo methods of determining the amount of genomic off-target editing caused by a gRNA. A gRNA with minimal genomic off-target activity can cause at least one instance of genomic off-target editing in 30% or less of cells such as, for example, 25% or less of cells, 20% or less of cells, 15% or less of cells 10% or less of cells, 5% or less of cells, 4% or less of cells, 3% or less of cells, 2% or less of cells, 1% or less of cells, 0.5% or less of cells, 0.25% or less of cells, or 0.1% or less of cells. Such determinations can, in some cases, be determined using in vitro systems.

[0243] Another aspect of target sequence selection relates to homologous recombination events. Sequences sharing regions of homology can serve as focal points for homologous recombination events that result in deletion of intervening sequences. Such recombination events occur during the normal course of replication of chromosomes and other DNA sequences, and also at other times when DNA sequences are being synthesized, such as in the case of repairs of double-strand breaks (DSBs), which occur on a regular basis during the normal cell replication cycle but can also be enhanced by the occurrence of various events (such as UV light and other inducers of DNA breakage) or the presence of certain agents (such as various chemical inducers). Many such inducers cause DSBs to occur indiscriminately in the genome, and DSBs can be regularly induced and repaired in normal cells. During repair, the original sequence can be reconstructed with complete fidelity, however, in some cases, small insertions or deletions (referred to as “indels”) are introduced at the DSB site.

[0244] DSBs can also be specifically induced at particular locations, as in the case of the endonucleases systems described herein, which can be used to cause directed or preferential gene modification events at selected chromosomal locations. The tendency for homologous sequences to be subject to recombination in the context of DNA repair (as well as replication) can be taken advantage of in a number of circumstances, and is the basis for one application of gene editing systems, such as CRISPR, in which homology directed repair is used to insert a sequence of interest, provided through use of a “donor” polynucleotide, into a desired chromosomal location.

[0245] Regions of homology between particular sequences, which can be small regions of “microhomology” that can comprise as few as ten base pairs or less, can also be used to bring about desired deletions. For example, a single DSB can be introduced at a site that exhibits microhomology with a nearby sequence. During the normal course of repair of such DSB, a result that occurs with high frequency is the deletion of the intervening sequence as a result of recombination being facilitated by the DSB and concomitant cellular repair process.

[0246] In some circumstances, however, selecting target sequences within regions of homology can also give rise to much larger deletions, including gene fusions (when the deletions are in coding regions), which may or may not be desired given the particular circumstances.

[0247] The examples provided herein further illustrate the selection of various target regions for the creation of DSBs designed to induce replacements that result in restoration of usherin protein function, as well as the selection of specific target sequences within such regions that are designed to minimize off-target events relative to on-target events.

### Homology Direct Repair (HDR)/Donor Nucleotides

[0248] Homology direct repair is a cellular mechanism for repairing double-stranded breaks (DSBs). The most common form is homologous recombination. There are additional pathways for HDR, including single-strand annealing and alternative-HDR. Genome engineering tools allow researchers to manipulate the cellular homologous recombination pathways to create site-specific modifications to the genome. It has been found that cells can repair a double-stranded break using a synthetic donor molecule provided in trans. Therefore, by introducing a double-stranded break near a specific mutation and providing a suitable donor, targeted changes can be made in the genome. Specific cleavage increases the rate of HDR more than 1,000 fold above the rate of 1 in 10⁶ cells receiving a homologous donor alone. The rate of HDR at a particular nucleotide is a function of the distance to the cut site, so choosing overlapping or nearest target sites is important. Gene editing offers the advantage over gene addition, as correcting in situ leaves the rest of the genome unperturbed.

[0249] Supplied donors for editing by HDR vary markedly but can contain the intended sequence with small or large flanking homology arms to allow annealing to the genomic DNA. The homology regions flanking the introduced genetic changes can be 30 bp or smaller, or as large as a multi-kilobase cassette that can contain promoters, cDNAs, etc. Both single-stranded and double-stranded oligonucleotide donors have been used. These oligonucleotides range in size from less than 100 nt to over many kb, though longer ssDNA can also be generated and used. Double-stranded donors can be used, including PCR amplicons, plasmids, and mini-circles. In general, it has been found that an AAV vector can be a very effective means of delivery of a donor template, though the packaging limits for individual donors is <5 kb. Active transcription of the donor increased HDR three-fold, indicating the inclusion of promoter may increase conversion. Conversely, CpG methylation of the donor decreased gene expression and HDR.

[0250] Donor nucleotides for correcting mutations often are small (<300 bp). This is advantageous, as HDR efficiencies may be inversely related to the size of the donor molecule. Also, it is expected that the donor templates can fit into size constrained AAV molecules, which have been shown to be an effective means of donor template delivery.

[0251] In addition to wildtype endonucleases, such as Cas9, nickase variants exist that have one or the other nuclease domain inactivated resulting in cutting of only one DNA strand. HDR can be directed from individual Cas nickases or using pairs of nickases that flank the target area. Donors can be single-stranded, nicked, or dsDNA.

[0252] The donor DNA can be supplied with the nuclease or independently by a variety of different methods, for example by transfection, nanoparticle, microinjection, or viral transduction. A range of tethering options has been proposed to increase the availability of the donors for HDR. Examples include attaching the donor to the nuclease, attaching to DNA binding proteins that bind nearby, or attaching to proteins that are involved in DNA end binding or repair.

[0253] The repair pathway choice can be guided by a number of culture conditions, such as those that influence cell cycling, or by targeting of DNA repair and associated proteins. For example, to increase HDR, key NHEJ molecules can be suppressed, such as KU70, KU80 or DNA ligase IV.

[0254] Without a donor present, the ends from a DNA break or ends from different breaks can be joined using the several non-homologous repair pathways in which the DNA ends are joined with little or no base-pairing at the junction. In addition to canonical NHEJ, there are similar repair mechanisms, such as ANHEJ. If there are two breaks, the intervening segment can be deleted or inverted. NHEJ repair pathways can lead to insertions, deletions or mutations at the joints.

[0255] NHEJ was used to insert a 15-kb inducible gene expression cassette into a defined locus in human cell lines after nuclease cleavage. The methods of insertion of large inducible gene expression cassettes have been described [Maresca, M., Lin, V. G., Guo, N. & Yang, Y., Genome Res 23, 539-546 (2013), Suzuki et al. Nature, 540, 144-149 (2016))].

[0256] In addition to genome editing by NHEJ or HDR, site-specific gene insertions have been conducted that use both the NHEJ pathway and HDR. A combination approach can be applicable in certain settings, possibly including intron/exon borders. NHEJ may prove effective for ligation in the intron, while the error-free HDR may be better suited in the coding region.

[0257] Illustrative modifications within the USH2A gene include replacements within or near (proximal) to the mutations referred to above, such as within the region of less than 3 kb, less than 2 kb, less than 1 kb, less than 0.5 kb upstream or downstream of the specific mutation. Given the relatively wide variations of mutations in the USH2A gene, it will be appreciated that numerous variations of the replacements referenced above (including without limitation larger as well as smaller deletions), would be expected to result in restoration of the usherin protein function.

[0258] Such variants can include replacements that are larger in the 5′ and/or 3′ direction than the specific mutation in question, or smaller in either direction. Accordingly, by “near” or “proximal” with respect to specific replacements, it is intended that the SSB or DSB locus associated with a desired replacement boundary (also referred to herein as an endpoint) can be within a region that is less than about 3 kb from the reference locus e.g. the mutation site. The SSB or DSB locus can be more proximal and within 2 kb, within 1 kb, within 0.5 kb, or within 0.1 kb. In the case of a small replacement, the desired endpoint can be at or “adjacent to” the reference locus, by which it is intended that the endpoint can be within 100 bp, within 50 bp, within 25 bp, or less than about 10 bp to 5 bp from the reference locus.

[0259] Larger or smaller replacements provide the same benefit, as long as the usherin protein function is restored. It is thus expected that many variations of the replacements described and illustrated herein can be effective for ameliorating one or more of Usher Syndrome Type 2A and non-syndromic ARRP.

[0260] The terms “near” or “proximal” with respect to the SSBs or DSBs refer to the SSBs or DSBs being within 3 kb, within 2 kb, within 1 kb, within 0.5 kb, within 0.25 kb, within 0.2 kb, within 0.1 kb, within 50 bp, within 25 bp, within 20 bp, within 15 bp, within 10 bp, or within 5 bp of the intron 12-13, exon 13, or intron 13-14. For example, the SSB or DSB locus can be within 3 kb, within 2 kb, within 1 kb, within 0.5 kb, within 0.25 kb, within 0.2 kb, within 0.1 kb, within 50 bp, within 25 bp, within 20 bp, within 15 bp, within 10 bp, or within 5 bp of intron 12-13. The SSB or DSB locus can be within 3 kb, within 2 kb, within 1 kb, within 0.5 kb, within 0.25 kb, within 0.2 kb, within 0.1 kb, within 50 bp, within 25 bp, within 20 bp, within 15 bp, within 10 bp, or within 5 bp of exon 13. The SSB or DSB locus can be within 3 kb, within 2 kb, within 1 kb, within 0.5 kb, within 0.25 kb, within 0.2 kb, within 0.1 kb, within 50 bp, within 25 bp, within 20 bp, within 15 bp, within 10 bp, or within 5 bp of intron 13-14.

[0261] The terms “near” or “proximal” with respect to the SSBs or DSBs can also refer to the SSBs or DSBs being within 3 kb, within 2 kb, within 1 kb, within 0.5 kb, within 0.25 kb, within 0.2 kb, within 0.1 kb, within 50 bp, within 25 bp, within 20 bp, within 15 bp, within 10 bp, or within 5 bp of the guanine deletion at nucleotide position c.2299 of the USH2A gene.

### Nucleic Acid Modifications (Chemical and Structural Modifications)

[0262] In some cases, polynucleotides introduced into cells can comprise one or more modifications that can be used individually or in combination, for example, to enhance activity, stability or specificity, alter delivery, reduce innate immune responses in host cells, or for other enhancements, as further described herein and known in the art.

[0263] In certain examples, modified polynucleotides can be used in the CRISPR/Cas9/Cpf1 system, in which case the guide RNAs (either single-molecule guides or double-molecule guides) and/or a DNA or an RNA encoding a Cas or Cpf1 endonuclease introduced into a cell can be modified, as described and illustrated below. Such modified polynucleotides can be used in the CRISPR/Cas9/Cpf1 system to edit any one or more genomic loci.

[0264] Using the CRISPR/Cas9/Cpf1 system for purposes of non-limiting illustrations of such uses, modifications of guide RNAs can be used to enhance the formation or stability of the CRISPR/Cas9/Cpf1 genome editing complex comprising guide RNAs, which can be single-molecule guides or double-molecule, and a Cas or Cpf1 endonuclease. Modifications of guide RNAs can also or alternatively be used to enhance the initiation, stability or kinetics of interactions between the genome editing complex with the target sequence in the genome, which can be used, for example, to enhance on-target activity. Modifications of guide RNAs can also or alternatively be used to enhance specificity, e.g., the relative rates of genome editing at the on-target site as compared to effects at other (off-target) sites.

[0265] Modifications can also or alternatively be used to increase the stability of a guide RNA, e.g., by increasing its resistance to degradation by ribonucleases (RNases) present in a cell, thereby causing its half-life in the cell to be increased. Modifications enhancing guide RNA half-life can be particularly useful in aspects in which a Cas or Cpf1 endonuclease is introduced into the cell to be edited via an RNA that needs to be translated in order to generate endonuclease, because increasing the half-life of guide RNAs introduced at the same time as the RNA encoding the endonuclease can be used to increase the time that the guide RNAs and the encoded Cas or Cpf1 endonuclease co-exist in the cell.

[0266] Modifications can also or alternatively be used to decrease the likelihood or degree to which RNAs introduced into cells elicit innate immune responses. Such responses, which have been well characterized in the context of RNA interference (RNAi), including small-interfering RNAs (siRNAs), as described below and in the art, tend to be associated with reduced half-life of the RNA and/or the elicitation of cytokines or other factors associated with immune responses.

[0267] One or more types of modifications can also be made to RNAs encoding an endonuclease that are introduced into a cell, including, without limitation, modifications that enhance the stability of the RNA (such as by increasing its degradation by RNAses present in the cell), modifications that enhance translation of the resulting product (i.e. the endonuclease), and/or modifications that decrease the likelihood or degree to which the RNAs introduced into cells elicit innate immune responses.

[0268] Combinations of modifications, such as the foregoing and others, can likewise be used. In the case of CRISPR/Cas9/Cpf1, for example, one or more types of modifications can be made to guide RNAs (including those exemplified above), and/or one or more types of modifications can be made to RNAs encoding Cas endonuclease (including those exemplified above).

[0269] By way of illustration, guide RNAs used in the CRISPR/Cas9/Cpf1 system, or other smaller RNAs can be readily synthesized by chemical means, enabling a number of modifications to be readily incorporated, as illustrated below and described in the art. While chemical synthetic procedures are continually expanding, purifications of such RNAs by procedures such as high-performance liquid chromatography (HPLC, which avoids the use of gels such as PAGE) tends to become more challenging as polynucleotide lengths increase significantly beyond a hundred or so nucleotides. One approach that can be used for generating chemically modified RNAs of greater length is to produce two or more molecules that are ligated together. Much longer RNAs, such as those encoding a Cas9 endonuclease, are more readily generated enzymatically. While fewer types of modifications are available for use in enzymatically produced RNAs, there are still modifications that can be used to, e.g., enhance stability, reduce the likelihood or degree of innate immune response, and/or enhance other attributes, as described further below and in the art; and new types of modifications are regularly being developed.

[0270] By way of illustration of various types of modifications, especially those used frequently with smaller chemically synthesized RNAs, modifications can comprise one or more nucleotides modified at the 2′ position of the sugar, in some aspects a 2′-O-alkyl, 2′-O-alkyl-O-alkyl, or 2′-fluoro-modified nucleotide. In some examples, RNA modifications can comprise 2′-fluoro, 2′-amino or 2′-O-methyl modifications on the ribose of pyrimidines, abasic residues, or an inverted base at the 3′ end of the RNA. Such modifications can be routinely incorporated into oligonucleotides and these oligonucleotides have been shown to have a higher Tm (i.e., higher target binding affinity) than 2′-deoxyoligonucleotides against a given target.

[0271] A number of nucleotide and nucleoside modifications have been shown to make the oligonucleotide into which they are incorporated more resistant to nuclease digestion than the native oligonucleotide; these modified oligos survive intact for a longer time than unmodified oligonucleotides. Specific examples of modified oligonucleotides include those comprising modified backbones, for example, phosphorothioates, phosphotriesters, methyl phosphonates, short chain alkyl or cycloalkyl intersugar linkages or short chain heteroatomic or heterocyclic intersugar linkages. Some oligonucleotides are oligonucleotides with phosphorothioate backbones and those with heteroatom backbones, particularly CH₂—NHO—CH₂, CH, ˜N(CH₃)˜O˜CH₂ (known as a methylene(methylimino) or MMI backbone), CH₂—O—N (CH₃)—CH₂, CH₂—N(CH₃)—N(CH₃)—CH₂ and O—N(CH₃)—CH₂—CH₂ backbones, wherein the native phosphodiester backbone is represented as O—P—O—CH,); amide backbones [see De Mesmaeker et al., Ace. Chem. Res., 28:366-374 (1995)]; morpholino backbone structures (see Summerton and Weller, U.S. Pat. No. 5,034,506); peptide nucleic acid (PNA) backbone (wherein the phosphodiester backbone of the oligonucleotide is replaced with a polyamide backbone, the nucleotides being bound directly or indirectly to the aza nitrogen atoms of the polyamide backbone, see Nielsen et al., Science 1991, 254, 1497). Phosphorus-containing linkages include, but are not limited to, phosphorothioates, chiral phosphorothioates, phosphorodithioates, phosphotriesters, aminoalkylphosphotriesters, methyl and other alkyl phosphonates comprising 3′alkylene phosphonates and chiral phosphonates, phosphinates, phosphoramidates comprising 3′-amino phosphoramidate and aminoalkylphosphoramidates, thionophosphoramidates, thionoalkylphosphonates, thionoalkylphosphotriesters, and boranophosphates having normal 3′-5′ linkages, 2′-5′ linked analogs of these, and those having inverted polarity wherein the adjacent pairs of nucleoside units are linked 3′-5′ to 5′-3′ or 2′-5′ to 5′-2′; see U.S. Pat. Nos. 3,687,808; 4,469,863; 4,476,301; 5,023,243; 5,177,196; 5,188,897; 5,264,423; 5,276,019; 5,278,302; 5,286,717; 5,321,131; 5,399,676; 5,405,939; 5,453,496; 5,455,233; 5,466,677; 5,476,925; 5,519,126; 5,536,821; 5,541,306; 5,550,111; 5,563,253; 5,571,799; 5,587,361; and 5,625,050.

[0272] Morpholino-based oligomeric compounds are described in Braasch and Corey, Biochemistry, 41(14): 4503-4510 (2002); Genesis, Volume 30, Issue 3, (2001); Heasman, Dev. Biol., 243: 209-214 (2002); Nasevicius et al., Nat. Genet., 26:216-220 (2000); Lacerra et al., Proc. Natl. Acad. Sci., 97: 9591-9596 (2000); and U.S. Pat. No. 5,034,506, issued Jul. 23, 1991.

[0273] Cyclohexenyl nucleic acid oligonucleotide mimetics are described in Wang et al., J. Am. Chem. Soc., 122: 8595-8602 (2000).

[0274] Modified oligonucleotide backbones that do not include a phosphorus atom therein have backbones that are formed by short chain alkyl or cycloalkyl internucleoside linkages, mixed heteroatom and alkyl or cycloalkyl internucleoside linkages, or one or more short chain heteroatomic or heterocyclic internucleoside linkages. These comprise those having morpholino linkages (formed in part from the sugar portion of a nucleoside); siloxane backbones; sulfide, sulfoxide and sulfone backbones; formacetyl and thioformacetyl backbones; methylene formacetyl and thioformacetyl backbones; alkene containing backbones; sulfamate backbones; methyleneimino and methylenehydrazino backbones; sulfonate and sulfonamide backbones; amide backbones; and others having mixed N, O, S, and CH₂ component parts; see U.S. Pat. Nos. 5,034,506; 5,166,315; 5,185,444; 5,214,134; 5,216,141; 5,235,033; 5,264,562; 5,264,564; 5,405,938; 5,434,257; 5,466,677; 5,470,967; 5,489,677; 5,541,307; 5,561,225; 5,596,086; 5,602,240; 5,610,289; 5,602,240; 5,608,046; 5,610,289; 5,618,704; 5,623,070; 5,663,312; 5,633,360; 5,677,437; and 5,677,439.

[0275] One or more substituted sugar moieties can also be included, e.g., one of the following at the 2′ position: OH, SH, SCH₃, F, OCN, OCH₃OCH₃, OCH₃O(CH₂)n CH₃, O(CH₂)n NH₂, or O(CH₂)n CH₃, where n is from 1 to about 10; C1 to C10 lower alkyl, alkoxyalkoxy, substituted lower alkyl, alkaryl or aralkyl; Cl; Br; CN; CF₃; OCF₃; O—, S—, or N-alkyl; O—, S—, or N-alkenyl; SOCH₃; SO₂CH₃; ONO₂; NO₂; N₃; NH₂; heterocycloalkyl; heterocycloalkaryl; aminoalkylamino; polyalkylamino; substituted silyl; an RNA cleaving group; a reporter group; an intercalator; a group for improving the pharmacokinetic properties of an oligonucleotide; or a group for improving the pharmacodynamic properties of an oligonucleotide and other substituents having similar properties. In some aspects, a modification includes 2′-methoxyethoxy (2′-O—CH₂CH₂OCH₃, also known as 2′-O-(2-methoxyethyl)) (Martin et al, HeIv. Chim. Acta, 1995, 78, 486). Other modifications include 2′-methoxy (2′-O—CH₃), 2′-propoxy (2′-OCH₂CH₂CH₃) and 2′-fluoro (2′-F). Similar modifications can also be made at other positions on the oligonucleotide, particularly the 3′ position of the sugar on the 3′ terminal nucleotide and the 5′ position of 5′ terminal nucleotide. Oligonucleotides can also have sugar mimetics, such as cyclobutyls in place of the pentofuranosyl group.

[0276] In some examples, both a sugar and an internucleoside linkage, i.e., the backbone, of the nucleotide units can be replaced with novel groups. The base units can be maintained for hybridization with an appropriate nucleic acid target compound. One such oligomeric compound, an oligonucleotide mimetic that has been shown to have excellent hybridization properties, is referred to as a peptide nucleic acid (PNA). In PNA compounds, the sugar-backbone of an oligonucleotide can be replaced with an amide containing backbone, for example, an aminoethylglycine backbone. The nucleobases can be retained and bound directly or indirectly to aza nitrogen atoms of the amide portion of the backbone. Representative U.S. patents that teach the preparation of PNA compounds comprise, but are not limited to, U.S. Pat. Nos. 5,539,082; 5,714,331; and 5,719,262. Further teaching of PNA compounds can be found in Nielsen et al, Science, 254: 1497-1500 (1991).

[0277] Guide RNAs can also include, additionally or alternatively, nucleobase (often referred to in the art simply as “base”) modifications or substitutions. As used herein, “unmodified” or “natural” nucleobases include adenine (A), guanine (G), thymine (T), cytosine (C), and uracil (U). Modified nucleobases include nucleobases found only infrequently or transiently in natural nucleic acids, e.g., hypoxanthine, 6-methyladenine, 5-Me pyrimidines, particularly 5-methylcytosine (also referred to as 5-methyl-2′ deoxycytosine and often referred to in the art as 5-Me-C), 5-hydroxymethylcytosine (HMC), glycosyl HMC and gentobiosyl HMC, as well as synthetic nucleobases, e.g., 2-aminoadenine, 2-(methylamino) adenine, 2-(imidazolylalkyl)adenine, 2-(aminoalklyamino) adenine or other heterosubstituted alkyladenines, 2-thiouracil, 2-thiothymine, 5-bromouracil, 5-hydroxymethyluracil, 8-azaguanine, 7-deazaguanine, N6 (6-aminohexyl) adenine, and 2,6-diaminopurine. Komberg, A., DNA Replication, W. H. Freeman & Co., San Francisco, pp. 75-77 (1980); Gebeyehu et al., Nucl. Acids Res. 15:4513 (1997). A “universal” base known in the art, e.g., inosine, can also be included. 5-Me-C substitutions have been shown to increase nucleic acid duplex stability by 0.6-1.2° C. (Sanghvi, Y. S., in Crooke, S. T. and Lebleu, B., eds., Antisense Research and Applications, CRC Press, Boca Raton, 1993, pp. 276-278) and are aspects of base substitutions.

[0278] Modified nucleobases can comprise other synthetic and natural nucleobases, such as 5-methylcytosine (5-me-C), 5-hydroxymethyl cytosine, xanthine, hypoxanthine, 2-aminoadenine, 6-methyl and other alkyl derivatives of adenine and guanine, 2-propyl and other alkyl derivatives of adenine and guanine, 2-thiouracil, 2-thiothymine and 2-thiocytosine, 5-halouracil and cytosine, 5-propynyl uracil and cytosine, 6-azo uracil, cytosine and thymine, 5-uracil (pseudo-uracil), 4-thiouracil, 8-halo, 8-amino, 8-thiol, 8-thioalkyl, 8-hydroxyl and other 8-substituted adenines and guanines, 5-halo particularly 5-bromo, 5-trifluoromethyl and other 5-substituted uracils and cytosines, 7-methylquanine and 7-methyladenine, 8-azaguanine and 8-azaadenine, 7-deazaguanine and 7-deazaadenine, and 3-deazaguanine and 3-deazaadenine.

[0279] Further, nucleobases can comprise those disclosed in U.S. Pat. No. 3,687,808, those disclosed in ‘The Concise Encyclopedia of Polymer Science and Engineering’, pages 858-859, Kroschwitz, J I., ed. John Wiley & Sons, 1990, those disclosed by Englisch et al., Angewandle Chemie, International Edition’, 1991, 30, page 613, and those disclosed by Sanghvi, Y. S., Chapter 15, Antisense Research and Applications’, pages 289-302, Crooke, S. T. and Lebleu, B. ea., CRC Press, 1993. Certain of these nucleobases are particularly useful for increasing the binding affinity of the oligomeric compounds of the invention. These include 5-substituted pyrimidines, 6-azapyrimidines and N-2, N-6 and 0-6 substituted purines, comprising 2-aminopropyladenine, 5-propynyluracil and 5-propynylcytosine. 5-methylcytosine substitutions have been shown to increase nucleic acid duplex stability by 0.6-1.2° C. (Sanghvi, Y. S., Crooke, S. T. and Lebleu, B., eds, ‘Antisense Research and Applications’, CRC Press, Boca Raton, 1993, pp. 276-278) and are aspects of base substitutions, even more particularly when combined with 2′-O-methoxyethyl sugar modifications. Modified nucleobases are described in U.S. Pat. No. 3,687,808, as well as U.S. Pat. Nos. 4,845,205; 5,130,302; 5,134,066; 5,175,273; 5,367,066; 5,432,272; 5,457,187; 5,459,255; 5,484,908; 5,502,177; 5,525,711; 5,552,540; 5,587,469; 5,596,091; 5,614,617; 5,681,941; 5,750,692; 5,763,588; 5,830,653; 6,005,096; and U.S. Patent Application Publication 2003/0158403.

[0280] Thus, the term “modified” refers to a non-natural sugar, phosphate, or base that is incorporated into a guide RNA, an endonuclease, or both a guide RNA and an endonuclease. It is not necessary for all positions in a given oligonucleotide to be uniformly modified, and in fact more than one of the aforementioned modifications can be incorporated in a single oligonucleotide, or even in a single nucleoside within an oligonucleotide.

[0281] The guide RNAs and/or mRNA (or DNA) encoding an endonuclease can be chemically linked to one or more moieties or conjugates that enhance the activity, cellular distribution, or cellular uptake of the oligonucleotide. Such moieties comprise, but are not limited to, lipid moieties such as a cholesterol moiety [Letsinger et al., Proc. Natl. Acad. Sci. USA, 86: 6553-6556 (1989)]; cholic acid [Manoharan et al., Bioorg. Med. Chem. Let., 4: 1053-1060 (1994)]; a thioether, e.g., hexyl-S-tritylthiol [Manoharan et al, Ann. N. Y. Acad. Sci., 660: 306-309 (1992) and Manoharan et al., Bioorg. Med. Chem. Let., 3: 2765-2770 (1993)]; a thiocholesterol [Oberhauser et al., Nucl. Acids Res., 20: 533-538 (1992)]; an aliphatic chain, e.g., dodecandiol or undecyl residues [Kabanov et al., FEBS Lett., 259: 327-330 (1990) and Svinarchuk et al., Biochimie, 75: 49-54 (1993)]; a phospholipid, e.g., di-hexadecyl-rac-glycerol or triethylammonium 1,2-di-O-hexadecyl-rac-glycero-3-H-phosphonate [Manoharan et al., Tetrahedron Lett., 36: 3651-3654 (1995) and Shea et al., Nucl. Acids Res., 18: 3777-3783 (1990)]; a polyamine or a polyethylene glycol chain [Mancharan et al., Nucleosides & Nucleotides, 14: 969-973 (1995)]; adamantane acetic acid [Manoharan et al., Tetrahedron Lett., 36: 3651-3654 (1995)]; a palmityl moiety [(Mishra et al., Biochim. Biophys. Acta, 1264: 229-237 (1995)]; or an octadecylamine or hexylamino-carbonyl-t oxycholesterol moiety [Crooke et al., J. Pharmacol. Exp. Ther., 277: 923-937 (1996)]. See also U.S. Pat. Nos. 4,828,979; 4,948,882; 5,218,105; 5,525,465; 5,541,313; 5,545,730; 5,552,538; 5,578,717; 5,580,731; 5,580,731; 5,591,584; 5,109,124; 5,118,802; 5,138,045; 5,414,077; 5,486,603; 5,512,439; 5,578,718; 5,608,046; 4,587,044; 4,605,735; 4,667,025; 4,762,779; 4,789,737; 4,824,941; 4,835,263; 4,876,335; 4,904,582; 4,958,013; 5,082,830; 5,112,963; 5,214,136; 5,082,830; 5,112,963; 5,214,136; 5,245,022; 5,254,469; 5,258,506; 5,262,536; 5,272,250; 5,292,873; 5,317,098; 5,371,241; 5,391,723; 5,416,203; 5,451,463; 5,510,475; 5,512,667; 5,514,785; 5,565,552; 5,567,810; 5,574,142; 5,585,481; 5,587,371; 5,595,726; 5,597,696; 5,599,923; 5,599, 928 and 5,688,941.

[0282] Sugars and other moieties can be used to target proteins and complexes comprising nucleotides, such as cationic polysomes and liposomes, to particular sites. For example, hepatic cell directed transfer can be mediated via asialoglycoprotein receptors (ASGPRs); see, e.g., Hu, et al., Protein Pept Lett. 21(10):1025-30 (2014). Other systems known in the art and regularly developed can be used to target biomolecules of use in the present case and/or complexes thereof to particular target cells of interest.

[0283] These targeting moieties or conjugates can include conjugate groups covalently bound to functional groups, such as primary or secondary hydroxyl groups. Conjugate groups of the present disclosure include intercalators, reporter molecules, polyamines, polyamides, polyethylene glycols, polyethers, groups that enhance the pharmacodynamic properties of oligomers, and groups that enhance the pharmacokinetic properties of oligomers. Typical conjugate groups include cholesterols, lipids, phospholipids, biotin, phenazine, folate, phenanthridine, anthraquinone, acridine, fluoresceins, rhodamines, coumarins, and dyes. Groups that enhance the pharmacodynamic properties, in the context of this present disclosure, include groups that improve uptake, enhance resistance to degradation, and/or strengthen sequence-specific hybridization with the target nucleic acid. Groups that enhance the pharmacokinetic properties, in the context of this invention, include groups that improve uptake, distribution, metabolism or excretion of the compounds of the present disclosure. Representative conjugate groups are disclosed in International Patent Application No. PCT/US92/09196, filed Oct. 23, 1992 (published as WO1993007883), and U.S. Pat. No. 6,287,860. Conjugate moieties include, but are not limited to, lipid moieties such as a cholesterol moiety, cholic acid, a thioether, e.g., hexyl-5-tritylthiol, a thiocholesterol, an aliphatic chain, e.g., dodecandiol or undecyl residues, a phospholipid, e.g., di-hexadecyl-rac-glycerol or triethylammonium 1,2-di-O-hexadecyl-rac-glycero-3-H-phosphonate, a polyamine or a polyethylene glycol chain, or adamantane acetic acid, a palmityl moiety, or an octadecylamine or hexylamino-carbonyl-oxy cholesterol moiety. See, e.g., U.S. Pat. Nos. 4,828,979; 4,948,882; 5,218,105; 5,525,465; 5,541,313; 5,545,730; 5,552,538; 5,578,717, 5,580,731; 5,580,731; 5,591,584; 5,109,124; 5,118,802; 5,138,045; 5,414,077; 5,486,603; 5,512,439; 5,578,718; 5,608,046; 4,587,044; 4,605,735; 4,667,025; 4,762,779; 4,789,737; 4,824,941; 4,835,263; 4,876,335; 4,904,582; 4,958,013; 5,082,830; 5,112,963; 5,214,136; 5,082,830; 5,112,963; 5,214,136; 5,245,022; 5,254,469; 5,258,506; 5,262,536; 5,272,250; 5,292,873; 5,317,098; 5,371,241; 5,391,723; 5,416,203, 5,451,463; 5,510,475; 5,512,667; 5,514,785; 5,565,552; 5,567,810; 5,574,142; 5,585,481; 5,587,371; 5,595,726; 5,597,696; 5,599,923; 5,599,928 and 5,688,941.

[0284] Longer polynucleotides that are less amenable to chemical synthesis and are typically produced by enzymatic synthesis can also be modified by various means. Such modifications can include, for example, the introduction of certain nucleotide analogs, the incorporation of particular sequences or other moieties at the 5′ or 3′ ends of molecules, and other modifications. By way of illustration, the mRNA encoding Cas9 is approximately 4 kb in length and can be synthesized by in vitro transcription. Modifications to the mRNA can be applied to, e.g., increase its translation or stability (such as by increasing its resistance to degradation with a cell), or to reduce the tendency of the RNA to elicit an innate immune response that is often observed in cells following introduction of exogenous RNAs, particularly longer RNAs such as that encoding Cas9.

[0285] Numerous such modifications have been described in the art, such as polyA tails, 5′ cap analogs (e.g., Anti Reverse Cap Analog (ARCA) or m7G(5′)ppp(5′)G (mCAP)), modified 5′ or 3′ untranslated regions (UTRs), use of modified bases (such as Pseudo-UTP, 2-Thio-UTP, 5-Methylcytidine-5′-Triphosphate (5-Methyl-CTP) or N6-Methyl-ATP), or treatment with phosphatase to remove 5′ terminal phosphates. These and other modifications are known in the art, and new modifications of RNAs are regularly being developed.

[0286] There are numerous commercial suppliers of modified RNAs, including for example, TniLink Biotech, AxoLabs, Bio-Synthesis Inc., Dharmacon and many others. As described by TniLink, for example, 5-Methyl-CTP can be used to impart desirable characteristics, such as increased nuclease stability, increased translation or reduced interaction of innate immune receptors with in vitro transcribed RNA. 5-Methylcytidine-5′-Triphosphate (5-Methyl-CTP), N6-Methyl-ATP, as well as Pseudo-UTP and 2-Thio-UTP, have also been shown to reduce innate immune stimulation in culture and in vivo while enhancing translation, as illustrated in publications by Kormann et al. and Warren et al. referred to below.

[0287] It has been shown that chemically modified mRNA delivered in vivo can be used to achieve improved therapeutic effects; see, e.g., Kormann et al., Nature Biotechnology 29, 154-157 (2011). Such modifications can be used, for example, to increase the stability of the RNA molecule and/or reduce its immunogenicity. Using chemical modifications such as Pseudo-U, N6-Methyl-A, 2-Thio-U and 5-Methyl-C, it was found that substituting just one quarter of the uridine and cytidine residues with 2-Thio-U and 5-Methyl-C respectively resulted in a significant decrease in toll-like receptor (TLR) mediated recognition of the mRNA in mice. By reducing the activation of the innate immune system, these modifications can be used to effectively increase the stability and longevity of the mRNA in vivo; see, e.g., Kormann et al., supra.

[0288] It has also been shown that repeated administration of synthetic messenger RNAs incorporating modifications designed to bypass innate anti-viral responses can reprogram differentiated human cells to pluripotency. See, e.g., Warren, et al., Cell Stem Cell, 7(5):618-30 (2010). Such modified mRNAs that act as primary reprogramming proteins can be an efficient means of reprogramming multiple human cell types. Such cells are referred to as induced pluripotency stem cells (iPSCs), and it was found that enzymatically synthesized RNA incorporating 5-Methyl-CTP, Pseudo-UTP and an Anti Reverse Cap Analog (ARCA) could be used to effectively evade the cell's antiviral response; see, e.g., Warren et al., supra.

[0289] Other modifications of polynucleotides described in the art include, for example, the use of polyA tails, the addition of 5′ cap analogs such as (m7G(5′)ppp(5′)G (mCAP)), modifications of 5′ or 3′ untranslated regions (UTRs), or treatment with phosphatase to remove 5′ terminal phosphates—and new approaches are regularly being developed.

[0290] A number of compositions and techniques applicable to the generation of modified RNAs for use herein have been developed in connection with the modification of RNA interference (RNAi), including small-interfering RNAs (siRNAs). siRNAs present particular challenges in vivo because their effects on gene silencing via mRNA interference are generally transient, which can require repeat administration. In addition, siRNAs are double-stranded RNAs (dsRNA) and mammalian cells have immune responses that have evolved to detect and neutralize dsRNA, which is often a by-product of viral infection. Thus, there are mammalian enzymes such as PKR (dsRNA-responsive kinase), and potentially retinoic acid-inducible gene I (RIG-I), that can mediate cellular responses to dsRNA, as well as Toll-like receptors (such as TLR3, TLR7 and TLR8) that can trigger the induction of cytokines in response to such molecules; see, e.g., the reviews by Angart et al., Pharmaceuticals (Basel) 6(4): 440-468 (2013); Kanasty et al., Molecular Therapy 20(3): 513-524 (2012); Burnett et al., Biotechnol J. 6(9):1130-46 (2011); Judge and MacLachlan, Hum Gene Ther 19(2):111-24 (2008).

[0291] A large variety of modifications have been developed and applied to enhance RNA stability, reduce innate immune responses, and/or achieve other benefits that can be useful in connection with the introduction of polynucleotides into human cells, as described herein; see, e.g., the reviews by Whitehead K A et al., Annual Review of Chemical and Biomolecular Engineering, 2: 77-96 (2011); Gaglione and Messere, Mini Rev Med Chem, 10(7):578-95 (2010); Chernolovskaya et al, Curr Opin Mol Ther., 12(2):158-67 (2010); Deleavey et al., Curr Protoc Nucleic Acid Chem Chapter 16:Unit 16.3 (2009); Behlke, Oligonucleotides 18(4):305-19 (2008); Fucini et al., Nucleic Acid Ther 22(3): 205-210 (2012); Bremsen et al., Front Genet 3:154 (2012).

[0292] As noted above, there are a number of commercial suppliers of modified RNAs, many of which have specialized in modifications designed to improve the effectiveness of siRNAs. A variety of approaches are offered based on various findings reported in the literature. For example, Dharmacon notes that replacement of a non-bridging oxygen with sulfur (phosphorothioate, PS) has been extensively used to improve nuclease resistance of siRNAs, as reported by Kole, Nature Reviews Drug Discovery 11:125-140 (2012). Modifications of the 2′-position of the ribose have been reported to improve nuclease resistance of the internucleotide phosphate bond while increasing duplex stability (Tm), which has also been shown to provide protection from immune activation. A combination of moderate PS backbone modifications with small, well-tolerated 2′-substitutions (2′-O-Methyl, 2′-Fluoro, 2′-Hydro) have been associated with highly stable siRNAs for applications in vivo, as reported by Soutschek et al. Nature 432:173-178 (2004); and 2′-O-Methyl modifications have been reported to be effective in improving stability as reported by Volkov, Oligonucleotides 19:191-202 (2009). With respect to decreasing the induction of innate immune responses, modifying specific sequences with 2′-O-Methyl, 2′-Fluoro, 2′-Hydro have been reported to reduce TLR7/TLR8 interaction while generally preserving silencing activity; see, e.g., Judge et al., Mol. Ther. 13:494-505 (2006); and Cekaite et al., J. Mol. Biol. 365:90-108 (2007). Additional modifications, such as 2-thiouracil, pseudouracil, 5-methylcytosine, 5-methyluracil, and N6-methyladenosine have also been shown to minimize the immune effects mediated by TLR3, TLR7, and TLR8; see, e.g., Kariko, K. et al., Immunity 23:165-175 (2005).

[0293] As is also known in the art, and commercially available, a number of conjugates can be applied to polynucleotides, such as RNAs, for use herein that can enhance their delivery and/or uptake by cells, including for example, cholesterol, tocopherol and folic acid, lipids, peptides, polymers, linkers and aptamers; see, e.g., the review by Winkler, Ther. Deliv. 4:791-809 (2013).

### Codon-Optimization

[0294] A polynucleotide encoding a site-directed polypeptide can be codon-optimized according to methods standard in the art for expression in the cell containing the target DNA of interest. For example, if the intended target nucleic acid is in a human cell, a human codon-optimized polynucleotide encoding Cas9 is contemplated for use for producing the Cas9 polypeptide.

### Nucleic Acids Encoding System Components

[0295] The present disclosure provides a nucleic acid comprising a nucleotide sequence encoding a genome-targeting nucleic acid of the disclosure, a site-directed polypeptide of the disclosure, and/or any nucleic acid or proteinaceous molecule necessary to carry out the aspects of the methods of the disclosure.

[0296] The nucleic acid encoding a genome-targeting nucleic acid of the disclosure, a site-directed polypeptide of the disclosure, and/or any nucleic acid or proteinaceous molecule necessary to carry out the aspects of the methods of the disclosure can comprise a vector (e.g., a recombinant expression vector).

[0297] The term “vector” refers to a nucleic acid molecule capable of transporting another nucleic acid to which it has been linked. One type of vector is a “plasmid”, which refers to a circular double-stranded DNA loop into which additional nucleic acid segments can be ligated. Another type of vector is a viral vector; wherein additional nucleic acid segments can be ligated into the viral genome. Certain vectors are capable of autonomous replication in a host cell into which they are introduced (e.g., bacterial vectors having a bacterial origin of replication and episomal mammalian vectors). Other vectors (e.g., non-episomal mammalian vectors) are integrated into the genome of a host cell upon introduction into the host cell, and thereby are replicated along with the host genome.

[0298] In some examples, vectors can be capable of directing the expression of nucleic acids to which they are operatively linked. Such vectors are referred to herein as “recombinant expression vectors”, or more simply “expression vectors”, which serve equivalent functions.

[0299] The term “operably linked” means that the nucleotide sequence of interest is linked to regulatory sequence(s) in a manner that allows for expression of the nucleotide sequence. The term “regulatory sequence” is intended to include, for example, promoters, enhancers and other expression control elements (e.g., polyadenylation signals). Such regulatory sequences are described, for example, in Goeddel; Gene Expression Technology: Methods in Enzymology 185, Academic Press, San Diego, CA (1990). Regulatory sequences include those that direct constitutive expression of a nucleotide sequence in many types of host cells, and those that direct expression of the nucleotide sequence only in certain host cells (e.g., tissue-specific regulatory sequences). It will be appreciated by those skilled in the art that the design of the expression vector can depend on such factors as the choice of the target cell, the level of expression desired, and the like.

[0300] Expression vectors contemplated include, but are not limited to, viral vectors based on vaccinia virus, poliovirus, adenovirus, adeno-associated virus, SV40, herpes simplex virus, human immunodeficiency virus, retrovirus (e.g., Murine Leukemia Virus, spleen necrosis virus, and vectors derived from retroviruses such as Rous Sarcoma Virus, Harvey Sarcoma Virus, avian leukosis virus, a lentivirus, human immunodeficiency virus, myeloproliferative sarcoma virus, and mammary tumor virus) and other recombinant vectors. Other vectors contemplated for eukaryotic target cells include, but are not limited to, the vectors pXT1, pSG5, pSVK3, pBPV, pMSG, and pSVLSV40 (Pharmacia). Additional vectors contemplated for eukaryotic target cells include, but are not limited to, the vectors pCTx-1, pCTx-2, and pCTx-3. Other vectors can be used so long as they are compatible with the host cell.

[0301] In some examples, a vector can comprise one or more transcription and/or translation control elements. Depending on the host/vector system utilized, any of a number of suitable transcription and translation control elements, including constitutive and inducible promoters, transcription enhancer elements, transcription terminators, etc. can be used in the expression vector. The vector can be a self-inactivating vector that either inactivates the viral sequences or the components of the CRISPR machinery or other elements.

[0302] Non-limiting examples of suitable eukaryotic promoters (i.e., promoters functional in a eukaryotic cell) include those from cytomegalovirus (CMV) immediate early, herpes simplex virus (HSV) thymidine kinase, early and late SV40, long terminal repeats (LTRs) from retrovirus, human elongation factor-1 promoter (EF1), a hybrid construct comprising the cytomegalovirus (CMV) enhancer fused to the chicken beta-actin promoter (CAG), murine stem cell virus promoter (MSCV), phosphoglycerate kinase-1 locus promoter (PGK), and mouse metallothionein-I.

[0303] For expressing small RNAs, including guide RNAs used in connection with Cas endonuclease, various promoters such as RNA polymerase III promoters, including for example U6 and H1, can be advantageous. Descriptions of and parameters for enhancing the use of such promoters are known in art, and additional information and approaches are regularly being described; see, e.g., Ma, H. et al., Molecular Therapy—Nucleic Acids 3, e161 (2014) doi:10.1038/mtna.2014.12.

[0304] The expression vector can also contain a ribosome binding site for translation initiation and a transcription terminator. The expression vector can also comprise appropriate sequences for amplifying expression. The expression vector can also include nucleotide sequences encoding non-native tags (e.g., histidine tag, hemagglutinin tag, green fluorescent protein, etc.) that are fused to the site-directed polypeptide, thus resulting in a fusion protein.

[0305] A promoter can be an inducible promoter (e.g., a heat shock promoter, tetracycline-regulated promoter, steroid-regulated promoter, metal-regulated promoter, estrogen receptor-regulated promoter, etc.). The promoter can be a constitutive promoter (e.g., CMV promoter, UBC promoter). In some cases, the promoter can be a spatially restricted and/or temporally restricted promoter (e.g., a tissue specific promoter, a cell type specific promoter, etc.).

[0306] The nucleic acid encoding a genome-targeting nucleic acid of the disclosure and/or a site-directed polypeptide can be packaged into or on the surface of delivery vehicles for delivery to cells. Delivery vehicles contemplated include, but are not limited to, nanospheres, liposomes, quantum dots, nanoparticles, polyethylene glycol particles, hydrogels, and micelles. As described in the art, a variety of targeting moieties can be used to enhance the preferential interaction of such vehicles with desired cell types or locations.

[0307] Introduction of the complexes, polypeptides, and nucleic acids of the disclosure into cells can occur by viral or bacteriophage infection, transfection, conjugation, protoplast fusion, lipofection, electroporation, nucleofection, calcium phosphate precipitation, polyethyleneimine (PEI)-mediated transfection, DEAE-dextran mediated transfection, liposome-mediated transfection, particle gun technology, calcium phosphate precipitation, direct micro-injection, nanoparticle-mediated nucleic acid delivery, and the like.

microRNA (miRNA)

[0308] Another class of gene regulatory regions is microRNA (miRNA) binding sites. miRNAs are non-coding RNAs that play key roles in post-transcriptional gene regulation. miRNA reportedly regulate the expression of a large number of mammalian protein-encoding genes. Specific and potent gene silencing by double-stranded RNA (RNAi) was discovered, plus additional small noncoding RNA (Canver, M. C. et al., Nature (2015)). The largest class of non-coding RNAs important for gene silencing is miRNAs. In mammals, miRNAs are first transcribed as long RNA transcripts, which can be separate transcriptional units, part of protein introns, or other transcripts. The long transcripts are called primary miRNA (pri-miRNA) that include imperfectly base-paired hairpin structures. These pri-miRNA can be cleaved into one or more shorter precursor miRNAs (pre-miRNAs) by Microprocessor, a protein complex in the nucleus, involving Drosha.

[0309] Pre-miRNAs are short stem loops ˜70 nucleotides in length with a 2-nucleotide 3′-overhang that are exported into the mature 19-25 nucleotide miRNA.miRNA* duplexes. The miRNA strand with lower base pairing stability (the guide strand) can be loaded onto the RNA-induced silencing complex (RISC). The passenger guide strand (marked with *), can be functional, but is usually degraded. The mature miRNA tethers RISC to partly complementary sequence motifs in target mRNAs predominantly found within the 3′ untranslated regions (UTRs) and induces posttranscriptional gene silencing (Bartel, D. P. Cell 136, 215-233 (2009); Saj, A. & Lai, E. C. Curr Opin Genet Dev 21, 504-510 (2011)).

[0310] miRNAs can be important in development, differentiation, cell cycle and growth control, and in virtually all biological pathways in mammals and other multicellular organisms. miRNAs can also be involved in cell cycle control, apoptosis and stem cell differentiation, hematopoiesis, hypoxia, muscle development, neurogenesis, insulin secretion, cholesterol metabolism, aging, viral replication and immune responses.

[0311] A single miRNA can target hundreds of different mRNA transcripts, while an individual transcript can be targeted by many different miRNAs. More than 28645 miRNAs have been annotated in the latest release of miRBase (v.21). Some miRNAs can be encoded by multiple loci, some of which can be expressed from tandemly co-transcribed clusters. The features allow for complex regulatory networks with multiple pathways and feedback controls. miRNAs can be integral parts of these feedback and regulatory circuits and can help regulate gene expression by keeping protein production within limits (Herranz, H. & Cohen, S. M. Genes Dev 24, 1339-1344 (2010); Posadas, D. M. & Carthew, R. W. Curr Opin Genet Dev 27, 1-6 (2014)).

[0312] miRNA can also be important in a large number of human diseases that are associated with abnormal miRNA expression. This association underscores the importance of the miRNA regulatory pathway. Recent miRNA deletion studies have linked miRNA with regulation of the immune responses (Stem-Ginossar, N. et al., Science 317, 376-381 (2007)).

[0313] miRNA also have a strong link to cancer and can play a role in different types of cancer. miRNAs have been found to be downregulated in a number of tumors. miRNA can be important in the regulation of key cancer-related pathways, such as cell cycle control and the DNA damage response, and can therefore be used in diagnosis and can be targeted clinically. miRNAs can delicately regulate the balance of angiogenesis, such that experiments depleting all miRNAs suppresses tumor angiogenesis (Chen, S. et al., Genes Dev 28, 1054-1067 (2014)).

[0314] As has been shown for protein coding genes, miRNA genes can also be subject to epigenetic changes occurring with cancer. Many miRNA loci can be associated with CpG islands increasing their opportunity for regulation by DNA methylation (Weber, B., Stresemann, C., Brueckner, B. & Lyko, F. Cell Cycle 6, 1001-1005 (2007)). The majority of studies have used treatment with chromatin remodeling drugs to reveal epigenetically silenced miRNAs.

[0315] In addition to their role in RNA silencing, miRNAs can also activate translation (Posadas, D. M. & Carthew, R. W. Curr Opin Genet Dev 27, 1-6 (2014)). Knocking out these sites can lead to decreased expression of the targeted gene, while introducing these sites can increase expression.

[0316] Individual miRNAs can be knocked out most effectively by mutating the seed sequence (bases 2-8 of the miRNA), which can be important for binding specificity. Cleavage in this region, followed by mis-repair by NHEJ can effectively abolish miRNA function by blocking binding to target sites. miRNAs could also be inhibited by specific targeting of the special loop region adjacent to the palindromic sequence. Catalytically inactive Cas9 can also be used to inhibit shRNA expression (Zhao, Y. et al., Sci Rep 4, 3943 (2014)). In addition to targeting the miRNA, the binding sites can also be targeted and mutated to prevent the silencing by miRNA.

[0317] According to the present disclosure, any of the miRNAs or their binding sites can be incorporated into the compositions of the invention.

[0318] The compositions can have a region such as, but not limited to, a region comprising the sequence of any of the miRNAs listed in SEQ ID NOs: 613-4696, the reverse complement of the miRNAs listed in SEQ ID NOs: 613-4696, or the miRNA anti-seed region of any of the miRNAs listed in SEQ ID NOs: 613-4696.

[0319] The compositions of the invention can comprise one or more miRNA target sequences, miRNA sequences, or miRNA seeds. Such sequences can correspond to any known miRNA such as those taught in US Publication No. 2005/0261218 and US Publication No. 2005/0059005. As a non-limiting example, known miRNAs, their sequences, and their binding site sequences in the human genome are listed in SEQ ID NOs: 613-4696.

[0320] A miRNA sequence comprises a “seed” region, i.e., a sequence in the region of positions 2-8 of the mature miRNA, which sequence has perfect Watson-Crick complementarity to the miRNA target sequence. A miRNA seed can comprise positions 2-8 or 2-7 of the mature miRNA. In some examples, a miRNA seed can comprise 7 nucleotides (e.g., nucleotides 2-8 of the mature miRNA), wherein the seed-complementary site in the corresponding miRNA target is flanked by an adenine (A) opposed to miRNA position 1. In some examples, a miRNA seed can comprise 6 nucleotides (e.g., nucleotides 2-7 of the mature miRNA), wherein the seed-complementary site in the corresponding miRNA target is flanked by an adenine (A) opposed to miRNA position 1. See for example, Grimson A, Farh K K, Johnston W K, Garrett-Engele P, Lim L P, Bartel D P; Mol Cell. 2007 Jul. 6; 27(1):91-105. The bases of the miRNA seed have complete complementarity with the target sequence.

[0321] Identification of miRNA, miRNA target regions, and their expression patterns and role in biology have been reported (Bonauer et al., Curr Drug Targets 2010 11:943-949; Anand and Cheresh Curr Opin Hematol 2011 18:171-176; Contreras and Rao Leukemia 2012 26:404-413 (2011 Dec. 20. doi: 10.1038/leu.2011.356); Bartel Cell 2009 136:215-233; Landgraf et al, Cell, 2007 129:1401-1414; Gentner and Naldini, Tissue Antigens. 2012 80:393-403.

[0322] For example, if the composition is not intended to be delivered to the liver but ends up there, then miR-122, a miRNA abundant in liver, can inhibit the expression of the sequence delivered if one or multiple target sites of miR-122 are engineered into the polynucleotide encoding that target sequence. Introduction of one or multiple binding sites for different miRNA can be engineered to further decrease the longevity, stability, and protein translation hence providing an additional layer of tenability.

[0323] As used herein, the term “microRNA site” refers to a miRNA target site or a miRNA recognition site, or any nucleotide sequence to which an miRNA binds or associates. It should be understood that “binding” can follow traditional Watson-Crick hybridization rules or can reflect any stable association of the miRNA with the target sequence at or adjacent to the miRNA site.

[0324] Conversely, for the purposes of the compositions of the present disclosure, miRNA binding sites can be engineered out of (i.e., removed from) sequences in which they naturally occur in order to increase protein expression in specific tissues. For example, miR-122 binding sites can be removed to improve protein expression in the liver.

[0325] Specifically, miRNAs are known to be differentially expressed in immune cells (also called hematopoietic cells), such as antigen presenting cells (APCs) (e.g. dendritic cells and macrophages), macrophages, monocytes, B lymphocytes, T lymphocytes, granulocytes, natural killer cells, etc. Immune cell specific miRNAs are involved in immunogenicity, autoimmunity, the immune-response to infection, inflammation, as well as unwanted immune response after gene therapy and tissue/organ transplantation. Immune cells specific miRNAs also regulate many aspects of development, proliferation, differentiation and apoptosis of hematopoietic cells (immune cells). For example, miR-142 and miR-146 are exclusively expressed in the immune cells, particularly abundant in myeloid dendritic cells. Introducing the miR-142 binding site into the 3′-UTR of a polypeptide of the present disclosure can selectively suppress the gene expression in the antigen presenting cells through miR-142 mediated mRNA degradation, limiting antigen presentation in professional APCs (e.g. dendritic cells) and thereby preventing antigen-mediated immune response after gene delivery (see, Annoni A et al., blood, 2009, 114, 5152-5161.

[0326] In one example, miRNAs binding sites that are known to be expressed in immune cells, in particular, the antigen presenting cells, can be engineered into the polynucleotides to suppress the expression of the polynucleotide in APCs through miRNA mediated RNA degradation, subduing the antigen-mediated immune response, while the expression of the polynucleotide is maintained in non-immune cells where the immune cell specific miRNAs are not expressed.

[0327] Many miRNA expression studies have been conducted, and are described in the art, to profile the differential expression of miRNAs in various cancer cells/tissues and other diseases. Some miRNAs are abnormally over-expressed in certain cancer cells and others are under-expressed. For example, miRNAs are differentially expressed in cancer cells (WO2008/154098, US2013/0059015, US2013/0042333, WO2011/157294); cancer stem cells (US2012/0053224); pancreatic cancers and diseases (US2009/0131348, US2011/0171646, US2010/0286232, U.S. Pat. No. 8,389,210); asthma and inflammation (U.S. Pat. No. 8,415,096); prostate cancer (US2013/0053264); hepatocellular carcinoma (WO2012/151212, US2012/0329672, WO2008/054828, U.S. Pat. No. 8,252,538); lung cancer cells (WO2011/076143, WO2013/033640, WO2009/070653, US2010/0323357); cutaneous T-cell lymphoma (WO2013/011378); colorectal cancer cells (WO2011/0281756, WO2011/076142); cancer positive lymph nodes (WO2009/100430, US2009/0263803); nasopharyngeal carcinoma (EP2112235); chronic obstructive pulmonary disease (US2012/0264626, US2013/0053263); thyroid cancer (WO2013/066678); ovarian cancer cells (US2012/0309645, WO2011/095623); breast cancer cells (WO2008/154098, WO2007/081740, US2012/0214699), leukemia and lymphoma (WO2008/073915, US2009/0092974, US2012/0316081, US2012/0283310, WO2010/018563.

### Human Cells

[0328] For ameliorating one or more of Usher Syndrome Type 2A and ARRP or any disorder associated with USH2A, as described and illustrated herein, the principal targets for gene editing are human cells. For example, in the ex vivo methods, the human cells can be somatic cells, which after being modified using the techniques as described, can give rise to differentiated cells, e.g., photoreceptor cells or retinal progenitor cells. For example, in the in vivo methods, the human cells can be photoreceptor cells or retinal progenitor cells.

[0329] By performing gene editing in autologous cells that are derived from and therefore already completely matched with the patient in need, it is possible to generate cells that can be safely re-introduced into the patient, and effectively give rise to a population of cells that can be effective in ameliorating one or more clinical conditions associated with the patient's disease.

[0330] Progenitor cells (also referred to as stem cells herein) are capable of both proliferation and giving rise to more progenitor cells, these in turn having the ability to generate a large number of mother cells that can in turn give rise to differentiated or differentiable daughter cells. The daughter cells themselves can be induced to proliferate and produce progeny that subsequently differentiate into one or more mature cell types, while also retaining one or more cells with parental developmental potential. The term “stem cell” refers then, to a cell with the capacity or potential, under particular circumstances, to differentiate to a more specialized or differentiated phenotype, and which retains the capacity, under certain circumstances, to proliferate without substantially differentiating. In one aspect, the term progenitor or stem cell refers to a generalized mother cell whose descendants (progeny) specialize, often in different directions, by differentiation, e.g., by acquiring completely individual characters, as occurs in progressive diversification of embryonic cells and tissues. Cellular differentiation is a complex process typically occurring through many cell divisions. A differentiated cell can derive from a multipotent cell that, itself, is derived from a multipotent cell, and so on. While each of these multipotent cells can be considered stem cells, the range of cell types that each can give rise to can vary considerably. Some differentiated cells also have the capacity to give rise to cells of greater developmental potential. Such capacity can be natural or can be induced artificially upon treatment with various factors. In many biological instances, stem cells can also be “multipotent” because they can produce progeny of more than one distinct cell type, but this is not required for “stem-ness.”

[0331] Self-renewal can be another important aspect of the stem cell. In theory, self-renewal can occur by either of two major mechanisms. Stem cells can divide asymmetrically, with one daughter retaining the stem state and the other daughter expressing some distinct other specific function and phenotype. Alternatively, some of the stem cells in a population can divide symmetrically into two stems, thus maintaining some stem cells in the population as a whole, while other cells in the population give rise to differentiated progeny only. Generally, “progenitor cells” have a cellular phenotype that is more primitive (i.e., is at an earlier step along a developmental pathway or progression than is a fully differentiated cell). Often, progenitor cells also have significant or very high proliferative potential. Progenitor cells can give rise to multiple distinct differentiated cell types or to a single differentiated cell type, depending on the developmental pathway and on the environment in which the cells develop and differentiate.

[0332] In the context of cell ontogeny, the adjective “differentiated,” or “differentiating” is a relative term. A “differentiated cell” is a cell that has progressed further down the developmental pathway than the cell to which it is being compared. Thus, stem cells can differentiate into lineage-restricted precursor cells (such as a myocyte progenitor cell), which in turn can differentiate into other types of precursor cells further down the pathway (such as a myocyte precursor), and then to an end-stage differentiated cell, such as a myocyte, which plays a characteristic role in a certain tissue type, and can or cannot retain the capacity to proliferate further.

### Edited Human Cells

[0333] Provided herein are methods for editing an USH2A gene containing a c.2299delG. Provided herein are gRNAs for editing an USH2A gene containing a c.2299delG in a human cell.

[0334] These methods and/or gRNAs disclosed herein can be used to edit a population of human cells. A number of human cells within a cell population sufficient for use in treating a patient can be edited. For example, 95%, 90%, 85%, 80%, 75%, 70%, 65%, 60%, 55%, or 50% of the human cells within a cell population can be edited and can be sufficient to use to treat a patient. In other examples, 45%, 40%, 35%, 30%, 25%, 20%, 15%, 10%, 5%, 1%, or 0.5% of the human cells within a cell population can be edited and can be sufficient to use to treat a patient. In various examples, the edited human cells can be first selected and cultured to expand the number of edited cells before administering them to a patient.

### Induced Pluripotent Stem Cells

[0335] The genetically engineered human cells described herein can be induced pluripotent stem cells (iPSCs). An advantage of using iPSCs is that the cells can be derived from the same subject to which the progenitor cells are to be administered. That is, a somatic cell can be obtained from a subject, reprogrammed to an induced pluripotent stem cell, and then re-differentiated into a progenitor cell to be administered to the subject (e.g., autologous cells). Because the progenitors are essentially derived from an autologous source, the risk of engraftment rejection or allergic response can be reduced compared to the use of cells from another subject or group of subjects. In addition, the use of iPSCs negates the need for cells obtained from an embryonic source. Thus, in one aspect, the stem cells used in the disclosed methods are not embryonic stem cells.

[0336] Although differentiation is generally irreversible under physiological contexts, several methods have been recently developed to reprogram somatic cells to iPSCs. Exemplary methods are known to those of skill in the art and are described briefly herein below.

[0337] The term “reprogramming” refers to a process that alters or reverses the differentiation state of a differentiated cell (e.g., a somatic cell). Stated another way, reprogramming refers to a process of driving the differentiation of a cell backwards to a more undifferentiated or more primitive type of cell. It should be noted that placing many primary cells in culture can lead to some loss of fully differentiated characteristics. Thus, simply culturing such cells included in the term differentiated cells does not render these cells non-differentiated cells (e.g., undifferentiated cells) or pluripotent cells. The transition of a differentiated cell to pluripotency requires a reprogramming stimulus beyond the stimuli that lead to partial loss of differentiated character in culture. Reprogrammed cells also have the characteristic of the capacity of extended passaging without loss of growth potential, relative to primary cell parents, which generally have capacity for only a limited number of divisions in culture.

[0338] The cell to be reprogrammed can be either partially or terminally differentiated prior to reprogramming. Reprogramming can encompass complete reversion of the differentiation state of a differentiated cell (e.g., a somatic cell) to a pluripotent state or a multipotent state. Reprogramming can encompass complete or partial reversion of the differentiation state of a differentiated cell (e.g., a somatic cell) to an undifferentiated cell (e.g., an embryonic-like cell). Reprogramming can result in expression of particular genes by the cells, the expression of which further contributes to reprogramming. In certain examples described herein, reprogramming of a differentiated cell (e.g., a somatic cell) can cause the differentiated cell to assume an undifferentiated state (e.g., is an undifferentiated cell). The resulting cells are referred to as “reprogrammed cells,” or “induced pluripotent stem cells (iPSCs or iPS cells).”

[0339] Reprogramming can involve alteration, e.g., reversal, of at least some of the heritable patterns of nucleic acid modification (e.g., methylation), chromatin condensation, epigenetic changes, genomic imprinting, etc., that occur during cellular differentiation. Reprogramming is distinct from simply maintaining the existing undifferentiated state of a cell that is already pluripotent or maintaining the existing less than fully differentiated state of a cell that is already a multipotent cell (e.g., a myogenic stem cell). Reprogramming is also distinct from promoting the self-renewal or proliferation of cells that are already pluripotent or multipotent, although the compositions and methods described herein can also be of use for such purposes, in some examples.

[0340] Many methods are known in the art that can be used to generate pluripotent stem cells from somatic cells. Any such method that reprograms a somatic cell to the pluripotent phenotype would be appropriate for use in the methods described herein.

[0341] Reprogramming methodologies for generating pluripotent cells using defined combinations of transcription factors have been described. Mouse somatic cells can be converted to ES cell-like cells with expanded developmental potential by the direct transduction of Oct4, Sox2, Klf4, and c-Myc; see, e.g., Takahashi and Yamanaka, Cell 126(4): 663-76 (2006). iPSCs resemble ES cells, as they restore the pluripotency-associated transcriptional circuitry and much of the epigenetic landscape. In addition, mouse iPSCs satisfy all the standard assays for pluripotency: specifically, in vitro differentiation into cell types of the three germ layers, teratoma formation, contribution to chimeras, germline transmission [see, e.g., Maherali and Hochedlinger, Cell Stem Cell. 3(6):595-605 (2008)], and tetraploid complementation.

[0342] Human iPSCs can be obtained using similar transduction methods, and the transcription factor trio, OCT4, SOX2, and NANOG, has been established as the core set of transcription factors that govern pluripotency; see, e.g., Budniatzky and Gepstein, Stem Cells Transl Med. 3(4):448-57 (2014); Barrett et al., Stem Cells Trans Med 3:1-6 sctm.2014-0121 (2014); Focosi et al., Blood Cancer Journal 4: e211 (2014). The production of iPSCs can be achieved by the introduction of nucleic acid sequences encoding stem cell-associated genes into an adult, somatic cell, historically using viral vectors.

[0343] iPSCs can be generated or derived from terminally differentiated somatic cells, as well as from adult stem cells, or somatic stem cells. That is, a non-pluripotent progenitor cell can be rendered pluripotent or multipotent by reprogramming. In such instances, it cannot be necessary to include as many reprogramming factors as required to reprogram a terminally differentiated cell. Further, reprogramming can be induced by the non-viral introduction of reprogramming factors, e.g., by introducing the proteins themselves, or by introducing nucleic acids that encode the reprogramming factors, or by introducing messenger RNAs that upon translation produce the reprogramming factors (see e.g., Warren et al., Cell Stem Cell, 7(5):618-30 (2010). Reprogramming can be achieved by introducing a combination of nucleic acids encoding stem cell-associated genes, including, for example, Oct-4 (also known as Oct-3/4 or Pouf51), Sox1, Sox2, Sox3, Sox 15, Sox 18, NANOG, Klf1, Klf2, Klf4, Klf5, NR5A2, c-Myc, 1-Myc, n-Myc, Rem2, Tert, and LIN28. Reprogramming using the methods and compositions described herein can further comprise introducing one or more of Oct-3/4, a member of the Sox family, a member of the Klf family, and a member of the Myc family to a somatic cell. The methods and compositions described herein can further comprise introducing one or more of each of Oct-4, Sox2, Nanog, c-MYC and Klf4 for reprogramming. As noted above, the exact method used for reprogramming is not necessarily critical to the methods and compositions described herein. However, where cells differentiated from the reprogrammed cells are to be used in, e.g., human therapy, in one aspect the reprogramming is not effected by a method that alters the genome. Thus, in such examples, reprogramming can be achieved, e.g., without the use of viral or plasmid vectors.

[0344] The efficiency of reprogramming (i.e., the number of reprogrammed cells) derived from a population of starting cells can be enhanced by the addition of various agents, e.g., small molecules, as shown by Shi et al., Cell-Stem Cell 2:525-528 (2008); Huangfu et al., Nature Biotechnology 26(7):795-797 (2008) and Marson et al., Cell-Stem Cell 3: 132-135 (2008). Thus, an agent or combination of agents that enhance the efficiency or rate of induced pluripotent stem cell production can be used in the production of patient-specific or disease-specific iPSCs. Some non-limiting examples of agents that enhance reprogramming efficiency include soluble Wnt, Wnt conditioned media, BIX-01294 (a G9a histone methyltransferase), PD0325901 (a MEK inhibitor), DNA methyltransferase inhibitors, histone deacetylase (HDAC) inhibitors, valproic acid, 5′-azacytidine, dexamethasone, suberoylanilide, hydroxamic acid (SAHA), vitamin C, and trichostatin (TSA), among others.

[0345] Other non-limiting examples of reprogramming enhancing agents include: Suberoylanilide Hydroxamic Acid (SAHA (e.g., MK0683, vorinostat) and other hydroxamic acids), BML-210, Depudecin (e.g., (−)-Depudecin), HC Toxin, Nullscript (4-(1,3-Dioxo-1H,3H-benzo[de]isoquinolin-2-yl)-N-hydroxybutanamide), Phenylbutyrate (e.g., sodium phenylbutyrate) and Valproic Acid ((VP A) and other short chain fatty acids), Scriptaid, Suramin Sodium, Trichostatin A (TSA), APHA Compound 8, Apicidin, Sodium Butyrate, pivaloyloxymethyl butyrate (Pivanex, AN-9), Trapoxin B, Chlamydocin, Depsipeptide (also known as FR901228 or FK228), benzamides (e.g., CI-994 (e.g., N-acetyl dinaline) and MS-27-275), MGCD0103, NVP-LAQ-824, CBHA (m-carboxycinnaminic acid bishydroxamic acid), JNJ16241199, Tubacin, A-161906, proxamide, oxamflatin, 3-Cl-UCHA (e.g., 6-(3-chlorophenylureido)caproic hydroxamic acid), AOE (2-amino-8-oxo-9, 10-epoxydecanoic acid), CHAP31 and CHAP 50. Other reprogramming enhancing agents include, for example, dominant negative forms of the HDACs (e.g., catalytically inactive forms), siRNA inhibitors of the HDACs, and antibodies that specifically bind to the HDACs. Such inhibitors are available, e.g., from BIOMOL International, Fukasawa, Merck Biosciences, Novartis, Gloucester Pharmaceuticals, Titan Pharmaceuticals, MethylGene, and Sigma Aldrich.

[0346] To confirm the induction of pluripotent stem cells for use with the methods described herein, isolated clones can be tested for the expression of a stem cell marker. Such expression in a cell derived from a somatic cell identifies the cells as induced pluripotent stem cells. Stem cell markers can be selected from the non-limiting group including SSEA3, SSEA4, CD9, Nanog, Fbxl5, Ecatl, Esgl, Eras, Gdf3, Fgf4, Cripto, Daxl, Zpf296, Slc2a3, Rexl, Utfl, and Natl. In one case, for example, a cell that expresses Oct4 or Nanog is identified as pluripotent. Methods for detecting the expression of such markers can include, for example, RT-PCR and immunological methods that detect the presence of the encoded polypeptides, such as Western blots or flow cytometric analyses. Detection can involve not only RT-PCR, but can also include detection of protein markers. Intracellular markers can be best identified via RT-PCR, or protein detection methods such as immunocytochemistry, while cell surface markers are readily identified, e.g., by immunocytochemistry.

[0347] The pluripotent stem cell character of isolated cells can be confirmed by tests evaluating the ability of the iPSCs to differentiate into cells of each of the three germ layers. As one example, teratoma formation in nude mice can be used to evaluate the pluripotent character of the isolated clones. The cells can be introduced into nude mice and histology and/or immunohistochemistry can be performed on a tumor arising from the cells. The growth of a tumor comprising cells from all three germ layers, for example, further indicates that the cells are pluripotent stem cells.

### Retinal Progenitor Cells and Photoreceptor Cells

[0348] In some examples, the genetically engineered human cells described herein are photoreceptor cells or retinal progenitor cells (RPCs). RPCs are multipotent progenitor cells that can give rise to all the six neurons of the retina as well as the Müller glia. Muller glia are a type of retinal glial cells and are the major glial component of the retina. Their function is to support the neurons of the retina and to maintain retinal homeostasis and integrity. Muller glia isolated from adult human retinas have been shown to differentiate into rod photoreceptors. Functional characterization of such Müller glia-derived photoreceptors by patch-clamp recordings has revealed that their electrical properties are comparable to those of adult rods (Giannelli et al., 2011, Stem Cells, (2):344-56). RPCs are gradually specified into lineage-restricted precursor cells during retinogenesis, which then maturate into the terminally differentiated neurons or Muller glia. Fetal-derived human retinal progenitor cells (hRPCs) exhibit molecular characteristics indicative of a retinal progenitor state up to the sixth passage. They demonstrate a gradual decrease in the percentages of K167-, SOX2-, and vimentin-positive cells from passages 1 to 6, whereas a sustained expression of nestin and PAX6 is seen through passage 6. Microarray analysis of passage 1 hRPCs demonstrates the expression of early retinal developmental genes: VIM (vimentin), K167, NES (nestin), PAX6, SOX2, HES5, GNL3, OTX2, DACH1, SIX6, and CHX10 (VSX2). The hRPCs are functional in nature and respond to excitatory neurotransmitters (Schmitt et al., 2009, Investigative Ophthalmology and Visual Sciences. 2009; 50(12):5901-8). The outermost region of the retina contains a supportive retinal pigment epithelium (RPE) layer, which maintains photoreceptor health by transporting nutrients and recycling shed photoreceptor parts. The RPE is attached to Bruch's membrane, an extracellular matrix structure at the interface between the choroid and retina. On the other side of the RPE, moving inwards towards the interior of the eye, there are three layers of neurons: light sensing rod and cone photoreceptors, a middle layer of connecting neurons (amacrine, bipolar and horizontal cells) and the innermost layer of ganglion cells, which transmit signals originating in the photoreceptor layer through the optic nerve and into the brain. In some aspects, the genetically engineered human cells described herein are photoreceptor cells, which are specialized types of neurons found in the retina. Photoreceptors convert light into signals that are able to stimulate biological processes and are responsible for sight. Rods and cones are the two classic photoreceptor cells that contribute information to the visual system.

### Isolating a Retinal Progenitor Cell and Photoreceptor Cell

[0349] Retinal cells, including progenitor cells may be isolated according to any method known in the art. For example, human retinal cells are isolated from fresh surgical specimens. The retinal pigment epithelium (RPE) is separated from the choroid by digesting the tissue with type IV collagenase and the retinal pigment epithelium patches are cultured. Following the growth of 100-500 cells from the explant, the primary cultures are passaged (Ishida M. et al., Current Eye Research 1998; 17(4):392-402) and characterized for expression of RPE markers. Rods are isolated by disruption of the biopsied retina using papain. Precautions are taken to avoid a harsh disruption and improve cell yield. The isolated cells are sorted to yield a population of pure rod cells and characterized further by immunostaining (Feodorova et al., MethodsX 2015; 2:39-46).

[0350] In order to isolate cones, neural retina is identified, cut-out, and placed on 10% gelatin. The inner retinal layers are isolated using a laser. The isolated cone monolayers are cultured for 18 hours and compared with untreated retinas by light microscopy and transmission microscopy to check for any structural damage. The cells are characterized for expression of cone-specific markers (Salchow et al., Current Eye Research 2001; 22).

[0351] In order to isolate retinal progenitor cells, the biopsied retina is minced with dual scalpels and digested enzymatically in an incubator at 37° C. The supernatants of the digested cells are centrifuged and the cells are resuspended in cell-free retinal progenitor-conditioned medium. The cells are transferred to fibronectin-coated tissue culture flasks containing fresh media and cultured (Klassen et al., Journal of Neuroscience Research 2004; 77:334-343).

Creating Patient Specific iPSCs

[0352] One step of the ex vivo methods of the present disclosure can involve creating a patient-specific iPS cell, patient-specific iPS cells, or a patient-specific iPS cell line. There are many established methods in the art for creating patient specific iPS cells, as described in Takahashi and Yamanaka 2006; Takahashi, Tanabe et al. 2007. For example, the creating step can comprise: a) isolating a somatic cell, such as a skin cell or fibroblast, from the patient; and b) introducing a set of pluripotency-associated genes into the somatic cell in order to induce the cell to become a pluripotent stem cell. The set of pluripotency-associated genes can be one or more of the genes selected from the group consisting of OCT4, SOX1, SOX2, SOX3, SOX15, SOX18, NANOG, KLF1, KLF2, KLF4, KLF5, c-MYC, n-MYC, REM2, TERT and LIN28.

### Performing a Biopsy or Aspirate of the Patient's Bone Marrow

[0353] A biopsy or aspirate is a sample of tissue or fluid taken from the body. There are many different kinds of biopsies or aspirates. Nearly all of them involve using a sharp tool to remove a small amount of tissue. If the biopsy will be on the skin or other sensitive area, numbing medicine can be applied first. A biopsy or aspirate can be performed according to any of the known methods in the art. For example, in a bone marrow aspirate, a large needle is used to enter the pelvis bone to collect bone marrow.

### Isolating a Mesenchymal Stem Cell

[0354] Mesenchymal stem cells can be isolated according to any method known in the art, such as from a patient's bone marrow or peripheral blood. For example, marrow aspirate can be collected into a syringe with heparin. Cells can be washed and centrifuged on a Percoll™ density gradient. Cells, such as blood cells, liver cells, interstitial cells, macrophages, mast cells, and thymocytes, can be separated using density gradient centrifugation media, Percoll™. The cells can then be cultured in Dulbecco's modified Eagle's medium (DMEM) (low glucose) containing 10% fetal bovine serum (FBS) (Pittinger M F, Mackay A M, Beck S C et al., Science 1999; 284:143-147).

Differentiation of Genome-Edited iPSCs into Other Cell Types

[0355] Another step of the ex vivo methods of the present disclosure can comprise differentiating the genome-edited iPSCs into photoreceptor cells or retinal progenitor cells. The differentiating step may be performed according to any method known in the art. For example, iPSCs can be used to generate retinal organioids and photoreceptors as described in the art (Phillips et al., Stem Cells, June 2014, 32(6): pgs. 1480-1492; Zhong et al. Nat. Commun., 2014, 5: pg 4047; Tucker et al., PLoS One, April 2011, 6(4): e18992). For example, hiPSC are differentiated into retinal progenitor cells using various treatments, including Wnt, Nodal, and Notch pathway inhibitors (Noggin, Dk1, LeftyA, and DAPT) and other growth factors. The retinal progenitor cells are further differentiated into photoreceptor cells, the treatment including: exposure to native retinal cells in coculture systems, RX+ or Mitf+ by subsequent treatment with retinoic acid and taurine, or exposure to several exogenous factors including Noggin, Dkk1, DAPT, and insulin-like growth factor (Yang et al., Stem Cells International 2016).

Differentiation of Genome-Edited Mesenchymal Stem Cells into Photoreceptor Cells or Retinal Progenitor Cells

[0356] Another step of the ex vivo methods of the present disclosure can comprise differentiating the genome-edited mesenchymal stem cells into photoreceptor cells or retinal progenitor cells. The differentiating step can be performed according to any method known in the art.

Implanting Cells into Patients

[0357] Another step of the ex vivo methods of the present disclosure can comprise implanting the photoreceptor cells or retinal progenitor cells into patients. This implanting step can be accomplished using any method of implantation known in the art. For example, the genetically modified cells can be injected directly in the patient's blood or otherwise administered to the patient.

[0358] Another step of the ex vivo methods of the invention involves implanting the photoreceptor cells or retinal progenitor cells into patients. This implanting step can be accomplished using any method of implantation known in the art. For example, the genetically modified cells can be injected directly in the patient's eye or otherwise administered to the patient.

### Genetically Modified Cells

[0359] The term “genetically modified cell” refers to a cell that comprises at least one genetic modification introduced by genome editing (e.g., using the CRISPR/Cas9/Cpf1 system). In some ex vivo examples herein, the genetically modified cell can be genetically modified progenitor cell. In some in vivo examples herein, the genetically modified cell can be a genetically modified photoreceptor cell or retinal progenitor cell. A genetically modified cell comprising an exogenous genome-targeting nucleic acid and/or an exogenous nucleic acid encoding a genome-targeting nucleic acid is contemplated herein.

[0360] The term “control treated population” describes a population of cells that has been treated with identical media, viral induction, nucleic acid sequences, temperature, confluency, flask size, pH, etc., with the exception of the addition of the genome editing components. Any method known in the art can be used to measure restoration of USH2A gene or usherin protein expression or activity, for example Western Blot analysis of the usherin protein or real time PCR for quantifying USH2A mRNA.

[0361] The term “isolated cell” refers to a cell that has been removed from an organism in which it was originally found, or a descendant of such a cell. Optionally, the cell can be cultured in vitro, e.g., under defined conditions or in the presence of other cells. Optionally, the cell can be later introduced into a second organism or re-introduced into the organism from which it (or the cell from which it is descended) was isolated.

[0362] The term “isolated population” with respect to an isolated population of cells refers to a population of cells that has been removed and separated from a mixed or heterogeneous population of cells. In some cases, the isolated population can be a substantially pure population of cells, as compared to the heterogeneous population from which the cells were isolated or enriched. In some cases, the isolated population can be an isolated population of human progenitor cells, e.g., a substantially pure population of human progenitor cells, as compared to a heterogeneous population of cells comprising human progenitor cells and cells from which the human progenitor cells were derived.

[0363] The term “substantially enhanced,” with respect to a particular cell population, refers to a population of cells in which the occurrence of a particular type of cell is increased relative to pre-existing or reference levels, by at least 2-fold, at least 3-, at least 4-, at least 5-, at least 6-, at least 7-, at least 8-, at least 9, at least 10-, at least 20-, at least 50-, at least 100-, at least 400-, at least 1000-, at least 5000-, at least 20000-, at least 100000- or more fold depending, e.g., on the desired levels of such cells for ameliorating one or more of Usher Syndrome Type 2A and ARRP.

[0364] The term “substantially enriched” with respect to a particular cell population, refers to a population of cells that is at least about 10%, about 20%, about 30%, about 40%, about 50%, about 60%, about 70% or more with respect to the cells making up a total cell population.

[0365] The terms “substantially pure” with respect to a particular cell population, refers to a population of cells that is at least about 75%, at least about 85%, at least about 90%, or at least about 95% pure, with respect to the cells making up a total cell population. That is, the terms “substantially pure” or “essentially purified,” with regard to a population of progenitor cells, refers to a population of cells that contain fewer than about 20%, about 15%, about 10%, about 9%, about 8%, about 7%, about 6%, about 5%, about 4%, about 3%, about 2%, about 1%, or less than 1%, of cells that are not progenitor cells as defined by the terms herein.

### Delivery

[0366] Guide RNA polynucleotides (RNA or DNA) and/or endonuclease polynucleotide(s) (RNA or DNA) can be delivered by viral or non-viral delivery vehicles known in the art. Alternatively, endonuclease polypeptide(s) can be delivered by viral or non-viral delivery vehicles known in the art, such as electroporation or lipid nanoparticles. In further alternative aspects, the DNA endonuclease can be delivered as one or more polypeptides, either alone or pre-complexed with one or more guide RNAs, or one or more crRNA together with a tracrRNA.

[0367] Polynucleotides can be delivered by non-viral delivery vehicles including, but not limited to, nanoparticles, liposomes, ribonucleoproteins, positively charged peptides, small molecule RNA-conjugates, aptamer-RNA chimeras, and RNA-fusion protein complexes. Some exemplary non-viral delivery vehicles are described in Peer and Lieberman, Gene Therapy, 18: 1127-1133 (2011) (which focuses on non-viral delivery vehicles for siRNA that are also useful for delivery of other polynucleotides).

[0368] Polynucleotides, such as guide RNA, sgRNA, and mRNA encoding an endonuclease, can be delivered to a cell or a patient by a lipid nanoparticle (LNP).

[0369] A LNP refers to any particle having a diameter of less than 1000 nm, 500 nm, 250 nm, 200 nm, 150 nm, 100 nm, 75 nm, 50 nm, or 25 nm. Alternatively, a nanoparticle can range in size from 1-1000 nm, 1-500 nm, 1-250 nm, 25-200 nm, 25-100 nm, 35-75 nm, or 25-60 nm.

[0370] LNPs can be made from cationic, anionic, or neutral lipids. Neutral lipids, such as the fusogenic phospholipid DOPE or the membrane component cholesterol, can be included in LNPs as ‘helper lipids’ to enhance transfection activity and nanoparticle stability. Limitations of cationic lipids include low efficacy owing to poor stability and rapid clearance, as well as the generation of inflammatory or anti-inflammatory responses.

[0371] LNPs can also be comprised of hydrophobic lipids, hydrophilic lipids, or both hydrophobic and hydrophilic lipids.

[0372] Any lipid or combination of lipids that are known in the art can be used to produce a LNP. Examples of lipids used to produce LNPs are: DOTMA, DOSPA, DOTAP, DMRIE, DC-cholesterol, DOTAP-cholesterol, GAP-DMORIE-DPyPE, and GL67A-DOPE-DMPE-polyethylene glycol (PEG). Examples of cationic lipids are: 98N12-5, C12-200, DLin-KC2-DMA (KC2), DLin-MC3-DMA (MC3), XTC, MD1, and 7C1. Examples of neutral lipids are: DPSC, DPPC, POPC, DOPE, and SM. Examples of PEG-modified lipids are: PEG-DMG, PEG-CerC14, and PEG-CerC20.

[0373] The lipids can be combined in any number of molar ratios to produce a LNP. In addition, the polynucleotide(s) can be combined with lipid(s) in a wide range of molar ratios to produce a LNP.

[0374] As stated previously, the site-directed polypeptide and genome-targeting nucleic acid can each be administered separately to a cell or a patient. On the other hand, the site-directed polypeptide can be pre-complexed with one or more guide RNAs, or one or more crRNA together with a tracrRNA. The pre-complexed material can then be administered to a cell or a patient. Such pre-complexed material is known as a ribonucleoprotein particle (RNP).

[0375] RNA is capable of forming specific interactions with RNA or DNA. While this property is exploited in many biological processes, it also comes with the risk of promiscuous interactions in a nucleic acid-rich cellular environment. One solution to this problem is the formation of ribonucleoprotein particles (RNPs), in which the RNA is pre-complexed with an endonuclease. Another benefit of the RNP is protection of the RNA from degradation.

[0376] The endonuclease in the RNP can be modified or unmodified. Likewise, the gRNA, crRNA, tracrRNA, or sgRNA can be modified or unmodified. Numerous modifications are known in the art and can be used.

[0377] The endonuclease and sgRNA can be generally combined in a 1:1 molar ratio. Alternatively, the endonuclease, crRNA and tracrRNA can be generally combined in a 1:1:1 molar ratio. However, a wide range of molar ratios can be used to produce a RNP.

### AAV (Adeno Associated Virus)

[0378] A recombinant adeno-associated virus (AAV) vector can be used for delivery. Techniques to produce rAAV particles, in which an AAV genome to be packaged that includes the polynucleotide to be delivered, rep and cap genes, and helper virus functions are provided to a cell are standard in the art. Production of rAAV typically requires that the following components are present within a single cell (denoted herein as a packaging cell): a rAAV genome, AAV rep and cap genes separate from (i.e., not in) the rAAV genome, and helper virus functions. The AAV rep and cap genes can be from any AAV serotype for which recombinant virus can be derived, and can be from a different AAV serotype than the rAAV genome ITRs, including, but not limited to, AAV serotypes described herein. Production of pseudotyped rAAV is disclosed in, for example, international patent application publication number WO 01/83692.

### AAV Serotypes

[0379] AAV particles packaging polynucleotides encoding compositions of the present disclosure, e.g., endonucleases, donor sequences, or RNA guide molecules, of the present disclosure can comprise or be derived from any natural or recombinant AAV serotype. According to the present disclosure, the AAV particles can utilize or be based on a serotype selected from any of the following serotypes, and variants thereof including but not limited to AAV1, AAV10, AAV106.1/hu.37, AAV11, AAV114.3/hu.40, AAV12, AAV127.2/hu.41, AAV127.5/hu.42, AAV128.1/hu.43, AAV128.3/hu.44, AAV130.4/hu.48, AAV145.1/hu.53, AAV145.5/hu.54, AAV145.6/hu.55, AAV16.12/hu.11, AAV16.3, AAV16.8/hu.10, AAV161.10/hu.60, AAV161.6/hu.61, AAV1-7/rh.48, AAV1-8/rh.49, AAV2, AAV2.5T, AAV2-15/rh.62, AAV223.1, AAV223.2, AAV223.4, AAV223.5, AAV223.6, AAV223.7, AAV2-3/rh.61, AAV24.1, AAV2-4/rh.50, AAV2-5/rh.51, AAV27.3, AAV29.3/bb.1, AAV29.5/bb.2, AAV2G9, AAV-2-pre-miRNA-101, AAV3, AAV3.1/hu.6, AAV3.1/hu.9, AAV3-11/rh.53, AAV3-3, AAV33.12/hu.17, AAV33.4/hu.15, AAV33.8/hu.16, AAV3-9/rh.52, AAV3a, AAV3b, AAV4, AAV4-19/rh.55, AAV42.12, AAV42-10, AAV42-11, AAV42-12, AAV42-13, AAV42-15, AAV42-1b, AAV42-2, AAV42-3a, AAV42-3b, AAV42-4, AAV42-5a, AAV42-5b, AAV42-6b, AAV42-8, AAV42-aa, AAV43-1, AAV43-12, AAV43-20, AAV43-21, AAV43-23, AAV43-25, AAV43-5, AAV4-4, AAV44.1, AAV44.2, AAV44.5, AAV46.2/hu.28, AAV46.6/hu.29, AAV4-8/r11.64, AAV4-8/rh.64, AAV4-9/rh.54, AAV5, AAV52.1/hu.20, AAV52/hu.19, AAV5-22/rh.58, AAV5-3/rh.57, AAV54.1/hu.21, AAV54.2/hu.22, AAV54.4R/hu.27, AAV54.5/hu.23, AAV54.7/hu.24, AAV58.2/hu.25, AAV6, AAV6.1, AAV6.1.2, AAV6.2, AAV7, AAV7.2, AAV7.3/hu.7, AAV8, AAV-8b, AAV-8h, AAV9, AAV9.11, AAV9.13, AAV9.16, AAV9.24, AAV9.45, AAV9.47, AAV9.61, AAV9.68, AAV9.84, AAV9.9, AAVA3.3, AAVA3.4, AAVA3.5, AAVA3.7, AAV-b, AAVC1, AAVC2, AAVC5, AAVCh.5, AAVCh.5R1, AAVcy.2, AAVcy.3, AAVcy.4, AAVcy.5, AAVCy.5R1, AAVCy.5R2, AAVCy.5R3, AAVCy.5R4, AAVcy.6, AAV-DJ, AAV-DJ8, AAVF3, AAVF5, AAV-h, AAVH-1/hu.1, AAVH2, AAVH-5/hu.3, AAVH6, AAVhE1.1, AAVhER1.14, AAVhEr1.16, AAVhEr1.18, AAVhER1.23, AAVhEr1.35, AAVhEr1.36, AAVhEr1.5, AAVhEr1.7, AAVhEr1.8, AAVhEr2.16, AAVhEr2.29, AAVhEr2.30, AAVhEr2.31, AAVhEr2.36, AAVhEr2.4, AAVhEr3.1, AAVhu.1, AAVhu.10, AAVhu.11, AAVhu.11, AAVhu.12, AAVhu.13, AAVhu.14/9, AAVhu.15, AAVhu.16, AAVhu.17, AAVhu.18, AAVhu.19, AAVhu.2, AAVhu.20, AAVhu.21, AAVhu.22, AAVhu.23.2, AAVhu.24, AAVhu.25, AAVhu.27, AAVhu.28, AAVhu.29, AAVhu.29R, AAVhu.3, AAVhu.31, AAVhu.32, AAVhu.34, AAVhu.35, AAVhu.37, AAVhu.39, AAVhu.4, AAVhu.40, AAVhu.41, AAVhu.42, AAVhu.43, AAVhu.44, AAVhu.44R1, AAVhu.44R2, AAVhu.44R3, AAVhu.45, AAVhu.46, AAVhu.47, AAVhu.48, AAVhu.48R1, AAVhu.48R2, AAVhu.48R3, AAVhu.49, AAVhu.5, AAVhu.51, AAVhu.52, AAVhu.53, AAVhu.54, AAVhu.55, AAVhu.56, AAVhu.57, AAVhu.58, AAVhu.6, AAVhu.60, AAVhu.61, AAVhu.63, AAVhu.64, AAVhu.66, AAVhu.67, AAVhu.7, AAVhu.8, AAVhu.9, AAVhu.t 19, AAVLG-10/rh.40, AAVLG-4/rh.38, AAVLG-9/hu.39, AAVLG-9/hu.39, AAV-LK01, AAV-LK02, AAVLK03, AAV-LK03, AAV-LK04, AAV-LK05, AAV-LK06, AAV-LK07, AAV-LK08, AAV-LK09, AAV-LK10, AAV-LK11, AAV-LK12, AAV-LK13, AAV-LK14, AAV-LK15, AAV-LK17, AAV-LK18, AAV-LK19, AAVN721-8/rh.43, AAV-PAEC, AAV-PAEC11, AAV-PAEC12, AAV-PAEC2, AAV-PAEC4, AAV-PAEC6, AAV-PAEC7, AAV-PAEC8, AAVpi.1, AAVpi.2, AAVpi.3, AAVrh.10, AAVrh.12, AAVrh.13, AAVrh.13R, AAVrh.14, AAVrh.17, AAVrh.18, AAVrh.19, AAVrh.2, AAVrh.20, AAVrh.21, AAVrh.22, AAVrh.23, AAVrh.24, AAVrh.25, AAVrh.2R, AAVrh.31, AAVrh.32, AAVrh.33, AAVrh.34, AAVrh.35, AAVrh.36, AAVrh.37, AAVrh.37R2, AAVrh.38, AAVrh.39, AAVrh.40, AAVrh.43, AAVrh.44, AAVrh.45, AAVrh.46, AAVrh.47, AAVrh.48, AAVrh.48, AAVrh.48.1, AAVrh.48.1.2, AAVrh.48.2, AAVrh.49, AAVrh.50, AAVrh.51, AAVrh.52, AAVrh.53, AAVrh.54, AAVrh.55, AAVrh.56, AAVrh.57, AAVrh.58, AAVrh.59, AAVrh.60, AAVrh.61, AAVrh.62, AAVrh.64, AAVrh.64R1, AAVrh.64R2, AAVrh.65, AAVrh.67, AAVrh.68, AAVrh.69, AAVrh.70, AAVrh.72, AAVrh.73, AAVrh.74, AAVrh.8, AAVrh.8R, AAVrh8R, AAVrh8R A586R mutant, AAVrh8R R533A mutant, BAAV, BNP61 AAV, BNP62 AAV, BNP63 AAV, bovine AAV, caprine AAV, Japanese AAV 10, true type AAV (ttAAV), UPENN AAV 10, AAV-LK16, AAAV, AAV Shuffle 100-1, AAV Shuffle 100-2, AAV Shuffle 100-3, AAV Shuffle 100-7, AAV Shuffle 10-2, AAV Shuffle 10-6, AAV Shuffle 10-8, AAV SM 100-10, AAV SM 100-3, AAV SM 10-1, AAV SM 10-2, and/or AAV SM 10-8.

[0380] In some examples, the AAV serotype can be, or have, a mutation in the AAV9 sequence as described by N Pulicherla et al. (Molecular Therapy 19(6):1070-1078 (2011), such as but not limited to, AAV9.9, AAV9.11, AAV9.13, AAV9.16, AAV9.24, AAV9.45, AAV9.47, AAV9.61, AAV9.68, AAV9.84.

[0381] In some examples, the AAV serotype can be, or have, a sequence as described in U.S. Pat. No. 6,156,303, such as, but not limited to, AAV3B (SEQ ID NO: 1 and 10 of U.S. Pat. No. 6,156,303), AAV6 (SEQ ID NO: 2, 7 and 11 of U.S. Pat. No. 6,156,303), AAV2 (SEQ ID NO: 3 and 8 of U.S. Pat. No. 6,156,303), AAV3A (SEQ ID NO: 4 and 9, of U.S. Pat. No. 6,156,303), or derivatives thereof.

[0382] In some examples, the serotype can be AAVDJ or a variant thereof, such as AAVDJ8 (or AAV-DJ8), as described by Grimm et al. (Journal of Virology 82(12): 5887-5911 (2008)). The amino acid sequence of AAVDJ8 can comprise two or more mutations in order to remove the heparin binding domain (HBD). As a non-limiting example, the AAV-DJ sequence described as SEQ ID NO: 1 in U.S. Pat. No. 7,588,772, can comprise two mutations: (1) R587Q where arginine (R; Arg) at amino acid 587 is changed to glutamine (Q; Gln) and (2) R590T where arginine (R; Arg) at amino acid 590 is changed to threonine (T; Thr). As another non-limiting example, can comprise three mutations: (1) K406R where lysine (K; Lys) at amino acid 406 is changed to arginine (R; Arg), (2) R587Q where arginine (R; Arg) at amino acid 587 is changed to glutamine (Q; Gln) and (3) R590T where arginine (R; Arg) at amino acid 590 is changed to threonine (T; Thr).

[0383] In some examples, the AAV serotype can be, or have, a sequence as described in International Publication No. WO2015121501, such as, but not limited to, true type AAV (ttAAV) (SEQ ID NO: 2 of WO2015121501), “UPenn AAV10” (SEQ ID NO: 8 of WO2015121501), “Japanese AAV10” (SEQ ID NO: 9 of WO2015121501), or variants thereof.

[0384] According to the present disclosure, AAV capsid serotype selection or use can be from a variety of species. In one example, the AAV can be an avian AAV (AAAV). The AAAV serotype can be, or have, a sequence as described in U.S. Pat. No. 9,238,800, such as, but not limited to, AAAV (SEQ ID NO: 1, 2, 4, 6, 8, 10, 12, and 14 of U.S. Pat. No. 9,238,800), or variants thereof.

[0385] In one example, the AAV can be a bovine AAV (BAAV). The BAAV serotype can be, or have, a sequence as described in U.S. Pat. No. 9,193,769, such as, but not limited to, BAAV (SEQ ID NO: 1 and 6 of U.S. Pat. No. 9,193,769), or variants thereof. The BAAV serotype can be or have a sequence as described in U.S. Pat. No. 7,427,396, such as, but not limited to, BAAV (SEQ ID NO: 5 and 6 of U.S. Pat. No. 7,427,396), or variants thereof.

[0386] In one example, the AAV can be a caprine AAV. The caprine AAV serotype can be, or have, a sequence as described in U.S. Pat. No. 7,427,396, such as, but not limited to, caprine AAV (SEQ ID NO: 3 of U.S. Pat. No. 7,427,396), or variants thereof.

[0387] In other examples the AAV can be engineered as a hybrid AAV from two or more parental serotypes. In one example, the AAV can be AAV2G9 which comprises sequences from AAV2 and AAV9. The AAV2G9 AAV serotype can be, or have, a sequence as described in United States Patent Publication No. US20160017005.

[0388] In one example, the AAV can be a serotype generated by the AAV9 capsid library with mutations in amino acids 390-627 (VP1 numbering) as described by Pulicherla et al. (Molecular Therapy 19(6):1070-1078 (2011). The serotype and corresponding nucleotide and amino acid substitutions can be, but is not limited to, AAV9.1 (G1594C; D532H), AAV6.2 (T1418A and T1436X; V473D and I479K), AAV9.3 (T1238A; F413Y), AAV9.4 (T1250C and A1617T; F417S), AAV9.5 (A1235G, A1314T, A1642G, C1760T; Q412R, T548A, A587V), AAV9.6 (T1231A; F411I), AAV9.9 (G1203A, G1785T; W595C), AAV9.10 (A1500G, T1676C; M559T), AAV9.11 (A1425T, A1702C, A1769T; T568P, Q590L), AAV9.13 (A1369C, A1720T; N457H, T574S), AAV9.14 (T1340A, T1362C, T1560C, G1713A; L447H), AAV9.16 (A1775T; Q592L), AAV9.24 (T1507C, T1521G; W503R), AAV9.26 (A1337G, A1769C; Y446C, Q590P), AAV9.33 (A1667C; D556A), AAV9.34 (A1534G, C1794T; N512D), AAV9.35 (A1289T, T1450A, C1494T, A1515T, C1794A, G1816A; Q430L, Y484N, N98K, V6061), AAV9.40 (A1694T, E565V), AAV9.41 (A1348T, T1362C; T450S), AAV9.44 (A1684C, A1701T, A1737G; N562H, K567N), AAV9.45 (A1492T, C1804T; N498Y, L602F), AAV9.46 (G1441C, T1525C, T1549G; G481R, W509R, L517V), 9.47 (G1241A, G1358A, A1669G, C1745T; S414N, G453D, K557E, T582I), AAV9.48 (C1445T, A1736T; P482L, Q579L), AAV9.50 (A1638T, C1683T, T1805A; Q546H, L602H), AAV9.53 (G1301A, A1405C, C1664T, G1811T; R134Q, S469R, A555V, G604V), AAV9.54 (C1531A, T1609A; L511I, L537M), AAV9.55 (T1605A; F535L), AAV9.58 (C1475T, C1579A; T492I, H527N), AAV.59 (T1336C; Y446H), AAV9.61 (A1493T; N498I), AAV9.64 (C1531A, A1617T; L511I), AAV9.65 (C1335T, T1530C, C1568A; A523D), AAV9.68 (C1510A; P504T), AAV9.80 (G1441A; G481R), AAV9.83 (C1402A, A1500T; P468T, E500D), AAV9.87 (T1464C, T1468C; S490P), AAV9.90 (A1196T; Y399F), AAV9.91 (T1316G, A1583T, C1782G, T1806C; L439R, K528I), AAV9.93 (A1273G, A1421G, A1638C, C1712T, G1732A, A1744T, A1832T; S425G, Q474R, Q546H, P571L, G578R, T582S, D611V), AAV9.94 (A1675T; M559L) and AAV9.95 (T1605A; F535L).

[0389] In one example, the AAV can be a serotype comprising at least one AAV capsid CD8+ T-cell epitope. As a non-limiting example, the serotype can be AAV1, AAV2 or AAV8.

[0390] In one example, the AAV can be a variant, such as PHP.A or PHP.B as described in Deverman. 2016. Nature Biotechnology. 34(2): 204-209.

[0391] In one example, the AAV can be a serotype selected from any of those found in SEQ ID NOs: 4697-5265 and Table 3.

[0392] In one example, the AAV can be encoded by a sequence, fragment or variant as described in SEQ ID NOs: 4697-5265 and Table 3.

[0393] A method of generating a packaging cell involves creating a cell line that stably expresses all of the necessary components for AAV particle production. For example, a plasmid (or multiple plasmids) comprising a rAAV genome lacking AAV rep and cap genes, AAV rep and cap genes separate from the rAAV genome, and a selectable marker, such as a neomycin resistance gene, are integrated into the genome of a cell. AAV genomes have been introduced into bacterial plasmids by procedures such as GC tailing (Samulski et al., 1982, Proc. Natl. Acad. S6. USA, 79:2077-2081), addition of synthetic linkers containing restriction endonuclease cleavage sites (Laughlin et al., 1983, Gene, 23:65-73) or by direct, blunt-end ligation (Senapathy & Carter, 1984, J. Biol. Chem., 259:4661-4666). The packaging cell line can then be infected with a helper virus, such as adenovirus. The advantages of this method are that the cells are selectable and are suitable for large-scale production of rAAV. Other examples of suitable methods employ adenovirus or baculovirus, rather than plasmids, to introduce rAAV genomes and/or rep and cap genes into packaging cells.

[0394] General principles of rAAV production are reviewed in, for example, Carter, 1992, Current Opinions in Biotechnology, 1533-539; and Muzyczka, 1992, Curr. Topics in Microbial. and Immunol., 158:97-129). Various approaches are described in Ratschin et al., Mol. Cell. Biol. 4:2072 (1984); Hermonat et al., Proc. Natl. Acad. Sci. USA, 81:6466 (1984); Tratschin et al., Mol. Cell. Biol. 5:3251 (1985); McLaughlin et al., J. Virol., 62:1963 (1988); and Lebkowski et al., 1988 Mol. Cell. Biol., 7:349 (1988). Samulski et al. (1989, J. Virol., 63:3822-3828); U.S. Pat. No. 5,173,414; WO 95/13365 and corresponding U.S. Pat. No. 5,658,776; WO 95/13392; WO 96/17947; PCT/US98/18600; WO 97/09441 (PCT/US96/14423); WO 97/08298 (PCT/US96/13872); WO 97/21825 (PCT/US96/20777); WO 97/06243 (PCT/FR96/01064); WO 99/11764; Perrin et al. (1995) Vaccine 13:1244-1250; Paul et al. (1993) Human Gene Therapy 4:609-615; Clark et al. (1996) Gene Therapy 3:1124-1132; U.S. Pat. Nos. 5,786,211; 5,871,982; and 6,258,595.

[0395] AAV vector serotypes can be matched to target cell types. For example, the following exemplary cell types can be transduced by the indicated AAV serotypes among others.

TABLE 3
Tissue/Cell Types and Serotypes

| Tissue/Cell Type | Serotype |
|---|---|
| Liver | AAV3, AA5, AAV8, AAV9 |
| Skeletal muscle | AAV1, AAV7, AAV6, AAV8, AAV9 |
| Central nervous system | AAV1, AAV4, AAV5, AAV8, AAV9 |
| RPE | AAV5, AAV4, AAV2, AAV8, AAV9 |
| | AAVrh8r |
| Photoreceptor cells | AAV5, AAV8, AAV9, AAVrh8R |
| Lung | AAV9, AAV5 |
| Heart | AAV8 |
| Pancreas | AAV8 |
| Kidney | AAV2, AAV8 |

[0396] In addition to adeno-associated viral vectors, other viral vectors can be used. Such viral vectors include, but are not limited to, lentivirus, alphavirus, enterovirus, pestivirus, baculovirus, herpesvirus, Epstein Barr virus, papovavirusr, poxvirus, vaccinia virus, and herpes simplex virus.

[0397] In some cases, Cas9 mRNA, sgRNA targeting one or two loci in USH2A gene, and donor DNA can each be separately formulated into lipid nanoparticles, or are all co-formulated into one lipid nanoparticle.

[0398] In some cases, Cas9 mRNA can be formulated in a lipid nanoparticle, while sgRNA and donor DNA can be delivered in an AAV vector.

[0399] Options are available to deliver the Cas9 nuclease as a DNA plasmid, as mRNA or as a protein. The guide RNA can be expressed from the same DNA, or can also be delivered as an RNA. The RNA can be chemically modified to alter or improve its half-life, or decrease the likelihood or degree of immune response. The endonuclease protein can be complexed with the gRNA prior to delivery. Viral vectors allow efficient delivery; split versions of Cas9 and smaller orthologs of Cas9 can be packaged in AAV, as can donors for HDR. A range of non-viral delivery methods also exist that can deliver each of these components, or non-viral and viral methods can be employed in tandem. For example, nanoparticles can be used to deliver the protein and guide RNA, while AAV can be used to deliver a donor DNA.

### Lentivirus

[0400] In some aspects, lentiviral vectors or particles can be used as delivery vehicles. Lentiviruses are subgroup of the Retroviridae family of viruses. Lentiviral particles are able to integrate their genetic material into the genome of a target/host cell. Examples of lentivirus include the Human Immunodeficiency Viruses: HIV-1 and HIV-2, Jembrana Disease Virus (JDV), equine infectious anemia virus (EIAV), equine infectious anemia virus, visna-maedi and caprine arthritis encephalitis virus (CAEV), the Simian Immunodeficiency Virus (SIV), feline immunodeficiency virus (FIV), bovine immunodeficiency virus (BIV). LV's are capable of infecting both dividing and non-dividing cells due to their unique ability to pass through a target cell's intact nuclear membrane Greenberg et al., University of Berkeley, California; 2006). Lentiviral particles that form the gene delivery vehicle are replication defective and are generated by attenuating the HIV virulence genes. For example, the genes Vpu, Vpr, Nef, Env, and Tat are excised making the vector biologically safe. Lentiviral vehicles, for example, derived from HIV-1/HIV-2 can mediate the efficient delivery, integration and long-term expression of transgenes into non-dividing cells. As used herein, the term “recombinant” refers to a vector or other nucleic acid containing both lentiviral sequences and non-lentiviral retroviral sequences.

[0401] In order to produce a lentivirus that is capable of infecting host cells, three types of vectors need to be co-expressed in virus producing cells: a backbone vector containing the transgene of interests and self-inactivating 3′-LTR regions, one construct expressing viral structure proteins, and one vector encoding vesicular stomatitis virus glycoprotein (VSVG) for encapsulation (Naldini, L. et al., Science 1996; 272, 263-267). Separation of the Rev gene from other structural genes further increases the biosafety by reducing the possibility of reverse recombination. Cell lines that can be used to produce high-titer lentiviral particles may include, but are not limited to 293T cells, 293 FT cells, and 293SF-3F6 cells (Witting et al., Human Gene Therapy, 2012; 23: 243-249; Ansorge et al., Journal of Genetic Medicine, 2009; 11: 868-876).

[0402] Methods for generating recombinant lentiviral particles are discussed in the art, for example, WO 2013076309 (PCT/EP2012/073645); WO 2009153563 (PCT/GB2009/001527); U.S. Pat. Nos. 7,629,153; and 6,808,905.

[0403] Cell types such as photoreceptors, retinal pigment epithelium, and ganglion cells have been successfully targeted with lentivirus (LV) vector. The efficiency of delivery to photoreceptors and ganglion cells is significantly higher with AAV than LV vectors.

### Pharmaceutically Acceptable Carriers

[0404] The ex vivo methods of administering progenitor cells to a subject contemplated herein involve the use of therapeutic compositions comprising progenitor cells.

[0405] Therapeutic compositions can contain a physiologically tolerable carrier together with the cell composition, and optionally at least one additional bioactive agent as described herein, dissolved or dispersed therein as an active ingredient. In some cases, the therapeutic composition is not substantially immunogenic when administered to a mammal or human patient for therapeutic purposes, unless so desired.

[0406] In general, the progenitor cells described herein can be administered as a suspension with a pharmaceutically acceptable carrier. One of skill in the art will recognize that a pharmaceutically acceptable carrier to be used in a cell composition will not include buffers, compounds, cryopreservation agents, preservatives, or other agents in amounts that substantially interfere with the viability of the cells to be delivered to the subject. A formulation comprising cells can include e.g., osmotic buffers that permit cell membrane integrity to be maintained, and optionally, nutrients to maintain cell viability or enhance engraftment upon administration. Such formulations and suspensions are known to those of skill in the art and/or can be adapted for use with the progenitor cells, as described herein, using routine experimentation.

[0407] A cell composition can also be emulsified or presented as a liposome composition, provided that the emulsification procedure does not adversely affect cell viability. The cells and any other active ingredient can be mixed with excipients that are pharmaceutically acceptable and compatible with the active ingredient, and in amounts suitable for use in the therapeutic methods described herein.

[0408] Additional agents included in a cell composition can include pharmaceutically acceptable salts of the components therein. Pharmaceutically acceptable salts include the acid addition salts (formed with the free amino groups of the polypeptide) that are formed with inorganic acids, such as, for example, hydrochloric or phosphoric acids, or such organic acids as acetic, tartaric, mandelic and the like. Salts formed with the free carboxyl groups can also be derived from inorganic bases, such as, for example, sodium, potassium, ammonium, calcium or ferric hydroxides, and such organic bases as isopropylamine, trimethylamine, 2-ethylamino ethanol, histidine, procaine and the like.

[0409] Physiologically tolerable carriers are well known in the art. Exemplary liquid carriers are sterile aqueous solutions that contain no materials in addition to the active ingredients and water, or contain a buffer such as sodium phosphate at physiological pH value, physiological saline or both, such as phosphate-buffered saline. Still further, aqueous carriers can contain more than one buffer salt, as well as salts such as sodium and potassium chlorides, dextrose, polyethylene glycol and other solutes. Liquid compositions can also contain liquid phases in addition to and to the exclusion of water. Exemplary of such additional liquid phases are glycerin, vegetable oils such as cottonseed oil, and water-oil emulsions. The amount of an active compound used in the cell compositions that is effective in the treatment of a particular disorder or condition can depend on the nature of the disorder or condition, and can be determined by standard clinical techniques.

### Guide RNA Formulation

[0410] Guide RNAs of the present disclosure can be formulated with pharmaceutically acceptable excipients such as carriers, solvents, stabilizers, adjuvants, diluents, etc., depending upon the particular mode of administration and dosage form. Guide RNA compositions can be formulated to achieve a physiologically compatible pH, and range from a pH of about 3 to a pH of about 11, about pH 3 to about pH 7, depending on the formulation and route of administration. In some cases, the pH can be adjusted to a range from about pH 5.0 to about pH 8. In some cases, the compositions can comprise a therapeutically effective amount of at least one compound as described herein, together with one or more pharmaceutically acceptable excipients. Optionally, the compositions can comprise a combination of the compounds described herein, or can include a second active ingredient useful in the treatment or prevention of bacterial growth (for example and without limitation, anti-bacterial or anti-microbial agents), or can include a combination of reagents of the present disclosure.

[0411] Suitable excipients include, for example, carrier molecules that include large, slowly metabolized macromolecules such as proteins, polysaccharides, polylactic acids, polyglycolic acids, polymeric amino acids, amino acid copolymers, and inactive virus particles. Other exemplary excipients can include antioxidants (for example and without limitation, ascorbic acid), chelating agents (for example and without limitation, EDTA), carbohydrates (for example and without limitation, dextrin, hydroxyalkylcellulose, and hydroxyalkylmethylcellulose), stearic acid, liquids (for example and without limitation, oils, water, saline, glycerol and ethanol), wetting or emulsifying agents, pH buffering substances, and the like.

### Administration & Efficacy

[0412] The terms “administering,” “introducing” and “transplanting” can be used interchangeably in the context of the placement of cells, e.g., progenitor cells, into a subject, by a method or route that results in at least partial localization of the introduced cells at a desired site, such as a site of injury or repair, such that a desired effect(s) is produced. The cells e.g., progenitor cells, or their differentiated progeny can be administered by any appropriate route that results in delivery to a desired location in the subject where at least a portion of the implanted cells or components of the cells remain viable. The period of viability of the cells after administration to a subject can be as short as a few hours, e.g., twenty-four hours, to a few days, to as long as several years, or even the life time of the patient, i.e., long-term engraftment. For example, in some aspects described herein, an effective amount of photoreceptor cells or retinal progenitor cells is administered via a systemic route of administration, such as an intraperitoneal or intravenous route.

[0413] The terms “administering,” “introducing” and “transplanting” can also be used interchangeably in the context of the placement of at least one of a gRNA, sgRNA, and an endonuclease into a subject, by a method or route that results in at least partial localization of the introduced gRNA, sgRNA, and/or endonuclease at a desired site, such as a site of injury or repair, such that a desired effect(s) is produced. The gRNA, sgRNA, and/or endonuclease can be administered by any appropriate route that results in delivery to a desired location in the subject.

[0414] The terms “individual,” “subject,” “host” and “patient” are used interchangeably herein and refer to any subject for whom diagnosis, treatment or therapy is desired. In some aspects, the subject is a mammal. In some aspects, the subject is a human being.

[0415] When provided prophylactically, progenitor cells described herein can be administered to a subject in advance of any symptom of one or more of Usher Syndrome Type 2A and ARRP. Accordingly, the prophylactic administration of a progenitor cell population serves to prevent one or more of Usher Syndrome Type 2A and ARRP.

[0416] A progenitor cell population being administered according to the methods described herein can comprise allogeneic progenitor cells obtained from one or more donors. Such progenitors can be of any cellular or tissue origin, e.g., liver, muscle, cardiac, etc. “Allogeneic” refers to a progenitor cell or biological samples comprising progenitor cells obtained from one or more different donors of the same species, where the genes at one or more loci are not identical. For example, a photoreceptor or retinal progenitor cell population being administered to a subject can be derived from one more unrelated donor subjects, or from one or more non-identical siblings. In some cases, syngeneic progenitor cell populations can be used, such as those obtained from genetically identical animals, or from identical twins. The progenitor cells can be autologous cells; that is, the progenitor cells are obtained or isolated from a subject and administered to the same subject, i.e., the donor and recipient are the same.

[0417] The term “effective amount” refers to the amount of a population of progenitor cells or their progeny needed to prevent or alleviate at least one or more signs or symptoms of one or more of Usher Syndrome Type 2A and ARRP, and relates to a sufficient amount of a composition to provide the desired effect, e.g., to treat a subject having one or more of Usher Syndrome Type 2A and ARRP. The term “therapeutically effective amount” therefore refers to an amount of progenitor cells or a composition comprising progenitor cells that is sufficient to promote a particular effect when administered to a typical subject, such as one who has or is at risk for one or more of Usher Syndrome Type 2A and ARRP. An effective amount would also include an amount sufficient to prevent or delay the development of a symptom of the disease, alter the course of a symptom of the disease (for example but not limited to, slow the progression of a symptom of the disease), or reverse a symptom of the disease. It is understood that for any given case, an appropriate “effective amount” can be determined by one of ordinary skill in the art using routine experimentation.

[0418] For use in the various aspects described herein, an effective amount of progenitor cells comprises at least 10² progenitor cells, at least 5×10² progenitor cells, at least 10³ progenitor cells, at least 5×10³ progenitor cells, at least 10⁴ progenitor cells, at least 5×10⁴ progenitor cells, at least 10⁵ progenitor cells, at least 2×10⁵ progenitor cells, at least 3×10⁵ progenitor cells, at least 4×10⁵ progenitor cells, at least 5×10⁵ progenitor cells, at least 6×10⁵ progenitor cells, at least 7×10⁵ progenitor cells, at least 8×10⁵ progenitor cells, at least 9×10⁵ progenitor cells, at least 1×10⁶ progenitor cells, at least 2×10⁶ progenitor cells, at least 3×10⁶ progenitor cells, at least 4×10⁶ progenitor cells, at least 5×10⁶ progenitor cells, at least 6×10⁶ progenitor cells, at least 7×10⁶ progenitor cells, at least 8×10⁶ progenitor cells, at least 9×10⁶ progenitor cells, or multiples thereof. The progenitor cells can be derived from one or more donors, or can be obtained from an autologous source. In some examples described herein, the progenitor cells can be expanded in culture prior to administration to a subject in need thereof.

[0419] Modest and incremental increases in the levels of functional usherin protein expressed in cells of patients having one or more of Usher Syndrome Type 2A and ARRP can be beneficial for ameliorating one or more symptoms of the disease, for increasing long-term survival, and/or for reducing side effects associated with other treatments. Upon administration of such cells to human patients, the presence of progenitors that are producing increased levels of functional usherin protein is beneficial. In some cases, effective treatment of a subject gives rise to at least about 3%, 5% or 7% functional usherin protein relative to total usherin in the treated subject. In some examples, functional usherin will be at least about 10% of total usherin. In some examples, functional usherin protein will be at least about 20% to 30% of total usherin protein. Similarly, the introduction of even relatively limited subpopulations of cells having significantly elevated levels of functional usherin protein can be beneficial in various patients because in some situations normalized cells will have a selective advantage relative to diseased cells. However, even modest levels of progenitors with elevated levels of functional usherin protein can be beneficial for ameliorating one or more aspects of one or more of Usher Syndrome Type 2A and ARRP in patients. In some examples, about 10%, about 20%, about 30%, about 40%, about 50%, about 60%, about 70%, about 80%, about 90% or more of the photoreceptor cells or retinal progenitor cells in patients to whom such cells are administered are producing increased levels of functional usherin protein.

[0420] “Administered” refers to the delivery of a progenitor cell composition into a subject by a method or route that results in at least partial localization of the cell composition at a desired site. A cell composition can be administered by any appropriate route that results in effective treatment in the subject, i.e., administration results in delivery to a desired location in the subject where at least a portion of the composition delivered, i.e., at least 1×10⁴ cells are delivered to the desired site for a period of time.

[0421] In one aspect of the method, the pharmaceutical composition can be administered via a route such as, but not limited to, enteral (into the intestine), gastroenteral, epidural (into the dura matter), oral (by way of the mouth), transdermal, peridural, intracerebral (into the cerebrum), intracerebroventricular (into the cerebral ventricles), epicutaneous (application onto the skin), intradermal, (into the skin itself), subcutaneous (under the skin), nasal administration (through the nose), intravenous (into a vein), intravenous bolus, intravenous drip, intraarterial (into an artery), intramuscular (into a muscle), intracardiac (into the heart), intraosseous infusion (into the bone marrow), intrathecal (into the spinal canal), intraperitoneal, (infusion or injection into the peritoneum), intravesical infusion, intravitreal, (through the eye), intracavernous injection (into a pathologic cavity) intracavitary (into the base of the penis), intravaginal administration, intrauterine, extra-amniotic administration, transdermal (diffusion through the intact skin for systemic distribution), transmucosal (diffusion through a mucous membrane), transvaginal, insufflation (snorting), sublingual, sublabial, enema, eye drops (onto the conjunctiva), in ear drops, auricular (in or by way of the ear), buccal (directed toward the cheek), conjunctival, cutaneous, dental (to a tooth or teeth), electro-osmosis, endocervical, endosinusial, endotracheal, extracorporeal, hemodialysis, infiltration, interstitial, intra-abdominal, intra-amniotic, intra-articular, intrabiliary, intrabronchial, intrabursal, intracartilaginous (within a cartilage), intracaudal (within the cauda equine), intracisternal (within the cisterna magna cerebellomedularis), intracorneal (within the cornea), dental intracornal, intracoronary (within the coronary arteries), intracorporus cavernosum (within the dilatable spaces of the corporus cavernosa of the penis), intradiscal (within a disc), intraductal (within a duct of a gland), intraduodenal (within the duodenum), intradural (within or beneath the dura), intraepidermal (to the epidermis), intraesophageal (to the esophagus), intragastric (within the stomach), intragingival (within the gingivae), intraileal (within the distal portion of the small intestine), intralesional (within or introduced directly to a localized lesion), intraluminal (within a lumen of a tube), intralymphatic (within the lymph), intramedullary (within the marrow cavity of a bone), intrameningeal (within the meninges), intramyocardial (within the myocardium), intraocular (within the eye), intraovarian (within the ovary), intrapericardial (within the pericardium), intrapleural (within the pleura), intraprostatic (within the prostate gland), intrapulmonary (within the lungs or its bronchi), intrasinal (within the nasal or periorbital sinuses), intraspinal (within the vertebral column), intrasynovial (within the synovial cavity of a joint), intratendinous (within a tendon), intratesticular (within the testicle), intrathecal (within the cerebrospinal fluid at any level of the cerebrospinal axis), intrathoracic (within the thorax), intratubular (within the tubules of an organ), intratumor (within a tumor), intratympanic (within the aurus media), intravascular (within a vessel or vessels), intraventricular (within a ventricle), iontophoresis (by means of electric current where ions of soluble salts migrate into the tissues of the body), irrigation (to bathe or flush open wounds or body cavities), laryngeal (directly upon the larynx), nasogastric (through the nose and into the stomach), occlusive dressing technique (topical route administration, which is then covered by a dressing that occludes the area), ophthalmic (to the external eye), oropharyngeal (directly to the mouth and pharynx), parenteral, percutaneous, periarticular, peridural, perineural, periodontal, rectal, respiratory (within the respiratory tract by inhaling orally or nasally for local or systemic effect), retrobulbar (behind the pons or behind the eyeball), intramyocardial (entering the myocardium), soft tissue, subarachnoid, subconjunctival, submucosal, topical, transplacental (through or across the placenta), transtracheal (through the wall of the trachea), transtympanic (across or through the tympanic cavity), ureteral (to the ureter), urethral (to the urethra), vaginal, caudal block, diagnostic, nerve block, biliary perfusion, cardiac perfusion, photopheresis and spinal.

[0422] Modes of administration include injection, infusion, instillation, and/or ingestion. “Injection” includes, without limitation, intravenous, intramuscular, intra-arterial, intrathecal, intraventricular, intracapsular, intraorbital, intracardiac, intradermal, intraperitoneal, transtracheal, subcutaneous, subcuticular, intraarticular, sub capsular, subretinal, subarachnoid, intraspinal, intracerebro spinal, and intrasternal injection and infusion. In some examples, the route is intravenous. For the delivery of cells, administration by injection or infusion can be made. For the delivery of gRNAs, Cas9, and donor templates, administration can be by injection into the subretinal space, in close proximity to the photoreceptors.

[0423] The cells can be administered systemically. The phrases “systemic administration,” “administered systemically”, “peripheral administration” and “administered peripherally” refer to the administration of a population of progenitor cells other than directly into a target site, tissue, or organ, such that it enters, instead, the subject's circulatory system and, thus, is subject to metabolism and other like processes.

[0424] The efficacy of a treatment comprising a composition for the treatment of one or more of Usher Syndrome Type 2A and ARRP can be determined by the skilled clinician. However, a treatment is considered “effective treatment,” if any one or all of the signs or symptoms of, as but one example, levels of functional usherin are altered in a beneficial manner (e.g., increased by at least 10%), or other clinically accepted symptoms or markers of disease are improved or ameliorated. Efficacy can also be measured by failure of an individual to worsen as assessed by hospitalization or need for medical interventions (e.g., progression of the disease is halted or at least slowed). Methods of measuring these indicators are known to those of skill in the art and/or described herein. Treatment includes any treatment of a disease in an individual or an animal (some non-limiting examples include a human, or a mammal) and includes: (1) inhibiting the disease, e.g., arresting, or slowing the progression of symptoms; or (2) relieving the disease, e.g., causing regression of symptoms; and (3) preventing or reducing the likelihood of the development of symptoms.

[0425] The treatment according to the present disclosure can ameliorate one or more symptoms associated with one or more of Usher Syndrome Type 2A and ARRP by increasing, decreasing or altering the amount of functional usherin in the individual. Signs typically associated with Usher Syndrome Type 2A include for example, hearing loss and an eye disorder called retinitis pigmentosa, which causes night-blindness and a loss of peripheral vision through the progressive degeneration of the retina. Many people with Usher syndrome also have severe balance problems.

### Kits

[0426] The present disclosure provides kits for carrying out the methods described herein. A kit can include one or more of a genome-targeting nucleic acid, a polynucleotide encoding a genome-targeting nucleic acid, a site-directed polypeptide, a polynucleotide encoding a site-directed polypeptide, and/or any nucleic acid or proteinaceous molecule necessary to carry out the aspects of the methods described herein, or any combination thereof.

[0427] A kit can comprise: (1) a vector comprising a nucleotide sequence encoding a genome-targeting nucleic acid, (2) the site-directed polypeptide or a vector comprising a nucleotide sequence encoding the site-directed polypeptide, and (3) a reagent for reconstitution and/or dilution of the vector(s) and or polypeptide.

[0428] A kit can comprise: (1) a vector comprising (i) a nucleotide sequence encoding a genome-targeting nucleic acid, and (ii) a nucleotide sequence encoding the site-directed polypeptide; and (2) a reagent for reconstitution and/or dilution of the vector.

[0429] In any of the above kits, the kit can comprise a single-molecule guide genome-targeting nucleic acid. In any of the above kits, the kit can comprise a double-molecule genome-targeting nucleic acid. In any of the above kits, the kit can comprise two or more double-molecule guides or single-molecule guides. The kits can comprise a vector that encodes the nucleic acid targeting nucleic acid.

[0430] In any of the above kits, the kit can further comprise a polynucleotide to be inserted to effect the desired genetic modification.

[0431] Components of a kit can be in separate containers, or combined in a single container.

[0432] Any kit described above can further comprise one or more additional reagents, where such additional reagents are selected from a buffer, a buffer for introducing a polypeptide or polynucleotide into a cell, a wash buffer, a control reagent, a control vector, a control RNA polynucleotide, a reagent for in vitro production of the polypeptide from DNA, adaptors for sequencing and the like. A buffer can be a stabilization buffer, a reconstituting buffer, a diluting buffer, or the like. A kit can also comprise one or more components that can be used to facilitate or enhance the on-target binding or the cleavage of DNA by the endonuclease, or improve the specificity of targeting.

[0433] In addition to the above-mentioned components, a kit can further comprise instructions for using the components of the kit to practice the methods. The instructions for practicing the methods can be recorded on a suitable recording medium. For example, the instructions can be printed on a substrate, such as paper or plastic, etc. The instructions can be present in the kits as a package insert, in the labeling of the container of the kit or components thereof (i.e., associated with the packaging or sub packaging), etc. The instructions can be present as an electronic storage data file present on a suitable computer readable storage medium, e.g. CD-ROM, diskette, flash drive, etc. In some instances, the actual instructions are not present in the kit, but means for obtaining the instructions from a remote source (e.g. via the Internet), can be provided. An example of this case is a kit that comprises a web address where the instructions can be viewed and/or from which the instructions can be downloaded. As with the instructions, this means for obtaining the instructions can be recorded on a suitable substrate.

### Additional Therapeutic Approaches

[0434] Gene editing can be conducted using nucleases engineered to target specific sequences. To date there are four major types of nucleases: meganucleases and their derivatives, zinc finger nucleases (ZFNs), transcription activator like effector nucleases (TALENs), and CRISPR-Cas9 nuclease systems. The nuclease platforms vary in difficulty of design, targeting density and mode of action, particularly as the specificity of ZFNs and TALENs is through protein-DNA interactions, while RNA-DNA interactions primarily guide Cas9. Cas9 cleavage also requires an adjacent motif, the PAM, which differs between different CRISPR systems. Cas9 from Streptococcus pyogenes cleaves using a NGG PAM, CRISPR from Neisseria meningitidis can cleave at sites with PAMs including NNNNGATT, NNNNNGTTT and NNNNGCTT. A number of other Cas9 orthologs target protospacer adjacent to alternative PAMs.

[0435] CRISPR endonucleases, such as Cas9, can be used in the methods of the present disclosure. However, the teachings described herein, such as therapeutic target sites, could be applied to other forms of endonucleases, such as ZFNs, TALENs, HEs, or MegaTALs, or using combinations of nucleases. However, in order to apply the teachings of the present disclosure to such endonucleases, one would need to, among other things, engineer proteins directed to the specific target sites.

[0436] Additional binding domains can be fused to the Cas9 protein to increase specificity. The target sites of these constructs would map to the identified gRNA specified site, but would require additional binding motifs, such as for a zinc finger domain. In the case of Mega-TAL, a meganuclease can be fused to a TALE DNA-binding domain. The meganuclease domain can increase specificity and provide the cleavage. Similarly, inactivated or dead Cas9 (dCas9) can be fused to a cleavage domain and require the sgRNA/Cas9 target site and adjacent binding site for the fused DNA-binding domain. This likely would require some protein engineering of the dCas9, in addition to the catalytic inactivation, to decrease binding without the additional binding site.

### Zinc Finger Nucleases

[0437] Zinc finger nucleases (ZFNs) are modular proteins comprised of an engineered zinc finger DNA binding domain linked to the catalytic domain of the type II endonuclease FokI. Because FokI functions only as a dimer, a pair of ZFNs must be engineered to bind to cognate target “half-site” sequences on opposite DNA strands and with precise spacing between them to enable the catalytically active FokI dimer to form. Upon dimerization of the FokI domain, which itself has no sequence specificity per se, a DNA double-strand break is generated between the ZFN half-sites as the initiating step in genome editing.

[0438] The DNA binding domain of each ZFN is typically comprised of 3-6 zinc fingers of the abundant Cys2-His2 architecture, with each finger primarily recognizing a triplet of nucleotides on one strand of the target DNA sequence, although cross-strand interaction with a fourth nucleotide also can be important. Alteration of the amino acids of a finger in positions that make key contacts with the DNA alters the sequence specificity of a given finger. Thus, a four-finger zinc finger protein will selectively recognize a 12 bp target sequence, where the target sequence is a composite of the triplet preferences contributed by each finger, although triplet preference can be influenced to varying degrees by neighboring fingers. An important aspect of ZFNs is that they can be readily re-targeted to almost any genomic address simply by modifying individual fingers, although considerable expertise is required to do this well. In most applications of ZFNs, proteins of 4-6 fingers are used, recognizing 12-18 bp respectively. Hence, a pair of ZFNs will typically recognize a combined target sequence of 24-36 bp, not including the typical 5-7 bp spacer between half-sites. The binding sites can be separated further with larger spacers, including 15-17 bp. A target sequence of this length is likely to be unique in the human genome, assuming repetitive sequences or gene homologs are excluded during the design process. Nevertheless, the ZFN protein-DNA interactions are not absolute in their specificity so off-target binding and cleavage events do occur, either as a heterodimer between the two ZFNs, or as a homodimer of one or the other of the ZFNs. The latter possibility has been effectively eliminated by engineering the dimerization interface of the FokI domain to create “plus” and “minus” variants, also known as obligate heterodimer variants, which can only dimerize with each other, and not with themselves. Forcing the obligate heterodimer prevents formation of the homodimer. This has greatly enhanced specificity of ZFNs, as well as any other nuclease that adopts these FokI variants.

[0439] A variety of ZFN-based systems have been described in the art, modifications thereof are regularly reported, and numerous references describe rules and parameters that are used to guide the design of ZFNs; see, e.g., Segal et al., Proc Natl Acad Sci USA 96(6):2758-63 (1999); Dreier B et al., J Mol Biol 303(4):489-502 (2000); Liu Q et al., J Biol Chem 277(6):3850-6 (2002); Dreier et al., J Biol Chem 280(42):35588-97 (2005); and Dreier et al., J Biol Chem 276(31):29466-78 (2001).

### Transcription Activator-Like Effector Nucleases (TALENs)

[0440] Transcription Activator-Like Effector Nucleases (TALENs) represent another format of modular nucleases whereby, as with ZFNs, an engineered DNA binding domain is linked to the FokI nuclease domain, and a pair of TALENs operates in tandem to achieve targeted DNA cleavage. The major difference from ZFNs is the nature of the DNA binding domain and the associated target DNA sequence recognition properties. The TALEN DNA binding domain derives from TALE proteins, which were originally described in the plant bacterial pathogen Xanthomonas sp. TALEs are comprised of tandem arrays of 33-35 amino acid repeats, with each repeat recognizing a single base pair in the target DNA sequence that is typically up to 20 bp in length, giving a total target sequence length of up to 40 bp. Nucleotide specificity of each repeat is determined by the repeat variable diresidue (RVD), which includes just two amino acids at positions 12 and 13. The bases guanine, adenine, cytosine and thymine are predominantly recognized by the four RVDs: Asn-Asn, Asn-Ile, His-Asp and Asn-Gly, respectively. This constitutes a much simpler recognition code than for zinc fingers, and thus represents an advantage over the latter for nuclease design. Nevertheless, as with ZFNs, the protein-DNA interactions of TALENs are not absolute in their specificity, and TALENs have also benefitted from the use of obligate heterodimer variants of the FokI domain to reduce off-target activity.

[0441] Additional variants of the FokI domain have been created that are deactivated in their catalytic function. If one half of either a TALEN or a ZFN pair contains an inactive FokI domain, then only single-strand DNA cleavage (nicking) will occur at the target site, rather than a DSB. The outcome is comparable to the use of CRISPR/Cas9/Cpf1 “nickase” mutants in which one of the Cas9 cleavage domains has been deactivated. DNA nicks can be used to drive genome editing by HDR, but at lower efficiency than with a DSB. The main benefit is that off-target nicks are quickly and accurately repaired, unlike the DSB, which is prone to NHEJ-mediated mis-repair.

[0442] A variety of TALEN-based systems have been described in the art, and modifications thereof are regularly reported; see, e.g., Boch, Science 326(5959):1509-12 (2009); Mak et al., Science 335(6069):716-9 (2012); and Moscou et al., Science 326(5959):1501 (2009). The use of TALENs based on the “Golden Gate” platform, or cloning scheme, has been described by multiple groups; see, e.g., Cermak et al., Nucleic Acids Res. 39(12):e82 (2011); Li et al., Nucleic Acids Res. 39(14):6315-25(2011); Weber et al., PLoS One. 6(2): e16765 (2011); Wang et al., J Genet Genomics 41(6):339-47, Epub 2014 May 17 (2014); and Cermak T et al., Methods Mol Biol. 1239:133-59 (2015).

### Homing Endonucleases

[0443] Homing endonucleases (HEs) are sequence-specific endonucleases that have long recognition sequences (14-44 base pairs) and cleave DNA with high specificity—often at sites unique in the genome. There are at least six known families of HEs as classified by their structure, including LAGLIDADG (SEQ ID NO: 5271), GIY-YIG, His-Cis box, H—N—H, PD-(D/E)xK, and Vsr-like that are derived from a broad range of hosts, including eukarya, protists, bacteria, archaea, cyanobacteria and phage. As with ZFNs and TALENs, HEs can be used to create a DSB at a target locus as the initial step in genome editing. In addition, some natural and engineered HEs cut only a single strand of DNA, thereby functioning as site-specific nickases. The large target sequence of HEs and the specificity that they offer have made them attractive candidates to create site-specific DSBs.

[0444] A variety of HE-based systems have been described in the art, and modifications thereof are regularly reported; see, e.g., the reviews by Steentoft et al., Glycobiology 24(8):663-80 (2014); Belfort and Bonocora, Methods Mol Biol. 1123:1-26 (2014); Hafez and Hausner, Genome 55(8):553-69 (2012).

### MegaTAL/Tev-mTALEN/MegaTev

[0445] As further examples of hybrid nucleases, the MegaTAL platform and Tev-mTALEN platform use a fusion of TALE DNA binding domains and catalytically active HEs, taking advantage of both the tunable DNA binding and specificity of the TALE, as well as the cleavage sequence specificity of the HE; see, e.g., Boissel et al., NAR 42: 2591-2601 (2014); Kleinstiver et al., G3 4:1155-65 (2014); and Boissel and Scharenberg, Methods Mol. Biol. 1239: 171-96 (2015).

[0446] In a further variation, the MegaTev architecture is the fusion of a meganuclease (Mega) with the nuclease domain derived from the GIY-YIG homing endonuclease I-TevI (Tev). The two active sites are positioned ˜30 bp apart on a DNA substrate and generate two DSBs with non-compatible cohesive ends; see, e.g., Wolfs et al., NAR 42, 8816-29 (2014). It is anticipated that other combinations of existing nuclease-based approaches will evolve and be useful in achieving the targeted genome modifications described herein.

dCas9-FokI or dCpf1-Fok1 and Other Nucleases

[0447] Combining the structural and functional properties of the nuclease platforms described above offers a further approach to genome editing that can potentially overcome some of the inherent deficiencies. As an example, the CRISPR genome editing system typically uses a single Cas9 endonuclease to create a DSB. The specificity of targeting is driven by a 20 or 24 nucleotide sequence in the guide RNA that undergoes Watson-Crick base-pairing with the target DNA (plus an additional 2 bases in the adjacent NAG or NGG PAM sequence in the case of Cas9 from S. pyogenes). Such a sequence is long enough to be unique in the human genome, however, the specificity of the RNA/DNA interaction is not absolute, with significant promiscuity sometimes tolerated, particularly in the 5′ half of the target sequence, effectively reducing the number of bases that drive specificity. One solution to this has been to completely deactivate the Cas9 or Cpf1 catalytic function—retaining only the RNA-guided DNA binding function—and instead fusing a FokI domain to the deactivated Cas9; see, e.g., Tsai et al., Nature Biotech 32: 569-76 (2014); and Guilinger et al., Nature Biotech. 32: 577-82 (2014). Because FokI must dimerize to become catalytically active, two guide RNAs are required to tether two FokI fusions in close proximity to form the dimer and cleave DNA. This essentially doubles the number of bases in the combined target sites, thereby increasing the stringency of targeting by CRISPR-based systems.

[0448] As further example, fusion of the TALE DNA binding domain to a catalytically active HE, such as I-TevI, takes advantage of both the tunable DNA binding and specificity of the TALE, as well as the cleavage sequence specificity of I-TevI, with the expectation that off-target cleavage can be further reduced.

### Methods, Compositions, Therapeutics, and Kits of the Invention

[0449] Accordingly, the present disclosure relates in particular to the following non-limiting inventions:

[0450] In a first method, Method 1, the present disclosure provides a method for editing an USH2A gene containing a guanine deletion at nucleotide position c.2299, the method comprising: introducing into a human cell one or more DNA endonuclease, thereby effecting one or more SSBs or DSBs within or near one or more of: intron 12-13, exon 13, and intron 13-14 of the USH2A gene that results in a correction thereby creating an edited human cell.

[0451] In another method, Method 2, the present disclosure provides a method for editing an USH2A gene containing a guanine deletion at nucleotide position c.2299 as provided in Method 1, wherein the guanine deletion at nucleotide position c.2299 is located in exon 13 of the USH2A gene.

[0452] In another method, Method 3, the present disclosure provides an in vivo method for treating a patient with one or more of Usher Syndrome Type 2A and ARRP, the method comprising: editing an USH2A gene containing a guanine deletion at nucleotide position c.2299 in a cell of the patient.

[0453] In another method, Method 4, the present disclosure provides an in vivo method for treating a patient with one or more of Usher Syndrome Type 2A and ARRP, as provided in Method 3, wherein the editing comprises: introducing into the cell one or more DNA endonuclease, thereby effecting one or more SSBs or DSBs within or near one or more of: intron 12-13, exon 13, and intron 13-14 of the USH2A gene that results in a correction and results in restoration of usherin protein function.

[0454] In another method, Method 5, the present disclosure provides an in vivo method for treating a patient with one or more of Usher Syndrome Type 2A and ARRP, as provided in any one of Methods 3 or 4, wherein the guanine deletion at nucleotide position c.2299 is located in exon 13 of the USH2A gene.

[0455] In another method, Method 6, the present disclosure provides a method, as provided in any one of Methods 1 or 4, wherein the one or more DNA endonuclease is a Cas1, Cas1B, Cas2, Cas3, Cas4, Cas5, Cas6, Cas7, Cas8, Cas9 (also known as Csn1 and Csx12), Cas100, Csy1, Csy2, Csy3, Cse1, Cse2, Csc1, Csc2, Csa5, Csn2, Csm2, Csm3, Csm4, Csm5, Csm6, Cmr1, Cmr3, Cmr4, Cmr5, Cmr6, Csb1, Csb2, Csb3, Csx17, Csx14, Csx10, Csx16, CsaX, Csx3, Csx1, Csx15, Csf1, Csf2, Csf3, Csf4, or Cpf1 endonuclease; a homolog thereof, a recombination of the naturally occurring molecule thereof, codon-optimized thereof, or modified versions thereof, and combinations thereof.

[0456] In another method, Method 7, the present disclosure provides an in vivo method for treating a patient with one or more of Usher Syndrome Type 2A and ARRP, as provided in Method 6, wherein the method comprises introducing into the cell one or more polynucleotides encoding the one or more DNA endonuclease.

[0457] In another method, Method 8, the present disclosure provides an in vivo method for treating a patient with one or more of Usher Syndrome Type 2A and ARRP, as provided in Method 6, wherein the method comprises introducing into the cell one or more RNAs encoding the one or more DNA endonuclease.

[0458] In another method, Method 9, the present disclosure provides an in vivo method for treating a patient with one or more of Usher Syndrome Type 2A and ARRP, as provided in any one of Methods 7 or 8, wherein the one or more polynucleotides or one or more RNAs is one or more modified polynucleotides or one or more modified RNAs.

[0459] In another method, Method 10, the present disclosure provides an in vivo method for treating a patient with one or more of Usher Syndrome Type 2A and ARRP, as provided in Method 6, wherein the DNA endonuclease is one or more proteins or polypeptides.

[0460] In another method, Method 11, the present disclosure provides a method, as provided in any one of Methods 1-10, wherein the method further comprises: introducing into the cell one or more gRNAs.

[0461] In another method, Method 12, the present disclosure provides an in vivo method for treating a patient with one or more of Usher Syndrome Type 2A and ARRP, as provided in Method 11, wherein the one or more gRNAs are sgRNAs.

[0462] In another method, Method 13, the present disclosure provides an in vivo method for treating a patient with one or more of Usher Syndrome Type 2A and ARRP, as provided in any one of Methods 11-12, wherein the one or more gRNAs or one or more sgRNAs is one or more modified gRNAs or one or more modified sgRNAs.

[0463] In another method, Method 14, the present disclosure provides an in vivo method for treating a patient with one or more of Usher Syndrome Type 2A and ARRP, as provided in any one of Methods 10-13, wherein the one or more DNA endonucleases is pre-complexed with one or more gRNAs or one or more sgRNAs.

[0464] In another method, Method 15, the present disclosure provides a method, as provided in any one of Methods 1, 2, or 4-14, wherein the restoration of usherin protein function is a result of exon 13 skipping during mRNA processing.

[0465] In another method, Method 16, the present disclosure provides an in vivo method for treating a patient with one or more of Usher Syndrome Type 2A and ARRP, as provided in any one of Methods 1-15, further comprising: introducing into the cell a polynucleotide donor template comprising at least a portion of the wild-type USH2A gene, or cDNA.

[0466] In another method, Method 17, the present disclosure provides an in vivo method for treating a patient with one or more of Usher Syndrome Type 2A and ARRP, as provided in Method 16, wherein the at least a portion of the wild-type USH2A gene or cDNA comprises exon 13, intronic regions, or combinations thereof.

[0467] In another method, Method 18, the present disclosure provides an in vivo method for treating a patient with one or more of Usher Syndrome Type 2A and ARRP, as provided in any one of Methods 16 or 17, wherein the polynucleotide donor template is either a single or double-stranded polynucleotide.

[0468] In another method, Method 19, the present disclosure provides an in vivo method for treating a patient with one or more of Usher Syndrome Type 2A and ARRP, as provided in any one of Methods 16 or 17, wherein the polynucleotide donor template has homologous arms to exon 13.

[0469] In another method, Method 20, the present disclosure provides a method, as provided in any one of Methods 1 or 4, further comprising: introducing into the cell one gRNA; wherein the one or more DNA endonuclease is one or more Cas9 or Cpf1 endonuclease that effect one SSB or DSB at a locus located within or near one or more of: the intron 12-13, the exon 13, and the intron 13-14 of the USH2A gene; and wherein the gRNA comprises a spacer sequence that is complementary to a segment of the locus located within or near one or more of: the intron 12-13, the exon 13, and the intron 13-14 of the USH2A gene.

[0470] In another method, Method 21, the present disclosure provides a method, as provided in any one of Methods 1 or 4, further comprising: introducing into the cell one or more gRNAs wherein the one or more DNA endonuclease is one or more Cas9 or Cpf1 endonuclease that effect a pair of SSBs or DSBs, the first at a 5′ locus within or near the intron 12-13 or the exon 13 of the USH2A gene and the second at a 3′ locus, within or near the exon 13 or the intron 13-14 of the USH2A gene; and wherein the first guide RNA comprises a spacer sequence that is complementary to a segment of the 5′ locus and the second guide RNA comprises a spacer sequence that is complementary to a segment of the 3′ locus.

[0471] In another method, Method 22, the present disclosure provides an in vivo method for treating a patient with one or more of Usher Syndrome Type 2A and ARRP, as provided in any one of Methods 20 or 21, wherein the guanine deletion at nucleotide position c.2299 is located in exon 13 of the USH2A gene.

[0472] In another method, Method 23, the present disclosure provides an in vivo method for treating a patient with one or more of Usher Syndrome Type 2A and ARRP, as provided in any one of Methods 20-22, wherein the one or more gRNAs are one or more sgRNAs.

[0473] In another method, Method 24, the present disclosure provides an in vivo method for treating a patient with one or more of Usher Syndrome Type 2A and ARRP, as provided in any one of Methods 20-23, wherein the one or more gRNAs or one or more sgRNAs is one or more modified gRNAs or one or more modified sgRNAs.

[0474] In another method, Method 25, the present disclosure provides an in vivo method for treating a patient with one or more of Usher Syndrome Type 2A and ARRP, as provided in any one of Methods 20-24, wherein the one or more DNA endonuclease is pre-complexed with one or more gRNAs or one or more sgRNAs.

[0475] In another method, Method 26, the present disclosure provides an in vivo method for treating a patient with one or more of Usher Syndrome Type 2A and ARRP, as provided in Method 20, further comprising: a polynucleotide donor template comprising at least a portion of the wild-type USH2A gene; wherein a new sequence from the polynucleotide donor template is inserted into the chromosomal DNA at the locus that results in a correction of the guanine deletion at nucleotide position c.2299 of the USH2A gene.

[0476] In another method, Method 27, the present disclosure provides an in vivo method for treating a patient with one or more of Usher Syndrome Type 2A and ARRP, as provided in Methods 21, further comprising: a polynucleotide donor template comprising at least a portion of the wild-type USH2A gene; wherein a new sequence from the polynucleotide donor template is inserted into the chromosomal DNA between the 5′ locus and the 3′ locus that results in a correction of a guanine deletion at nucleotide position c.2299 in the chromosomal DNA between the 5′ locus and the 3′ locus.

[0477] In another method, Method 28, the present disclosure provides an in vivo method for treating a patient with one or more of Usher Syndrome Type 2A and ARRP, as provided in any one of Methods 26-27, wherein the at least a portion of the wild-type USH2A gene or cDNA comprises exon 13, intronic regions, or combinations thereof.

[0478] In another method, Method 29, the present disclosure provides an in vivo method for treating a patient with one or more of Usher Syndrome Type 2A and ARRP, as provided in any one of Methods 26-27, wherein the polynucleotide donor template is either a single or double-stranded polynucleotide.

[0479] In another method, Method 30, the present disclosure provides an in vivo method for treating a patient with one or more of Usher Syndrome Type 2A and ARRP, as provided in any one of Methods 26-27, wherein the polynucleotide donor template has homologous arms to exon 13.

[0480] In another method, Method 31, the present disclosure provides an in vivo method for treating a patient with one or more of Usher Syndrome Type 2A and ARRP, as provided in any one of Methods 20-30, wherein the SSBs or DSBs are within or near the intron 12-13 and the intron 13-14 of the USH2A gene.

[0481] In another method, Method 32, the present disclosure provides an in vivo method for treating a patient with one or more of Usher Syndrome Type 2A and ARRP, as provided in any one of Methods 20-30, wherein the SSBs or DSBs are within or near the intron 12-13 and the exon 13 of the USH2A gene.

[0482] In another method, Method 33, the present disclosure provides an in vivo method for treating a patient with one or more of Usher Syndrome Type 2A and ARRP, as provided in any one of Methods 11-14 or 23-25, wherein the gRNA or sgRNA is complementary to a segment within or near the intron 12-13, the exon 13, or the intron 13-14 of the USH2A gene.

[0483] In another method, Method 34, the present disclosure provides a method, as provided in any one of Methods 1, 2, or 4-33, wherein the correction is by homology directed repair (HDR).

[0484] In another method, Method 35, the present disclosure provides a method, as provided in any one of Methods 1 or 4, further comprising: introducing into the cell two gRNAs; wherein the one or more DNA endonuclease is one or more Cas9 or Cpf1 endonuclease that effect a pair of DSBs, the first at a 5′ DSB locus within or near the intron 12-13 or the exon 13 of the USH2A gene and the second at a 3′ DSB locus within or near the exon 13 or the intron 13-14 of the USH2A gene that causes a deletion of the chromosomal DNA between the 5′ DSB locus and the 3′ DSB locus that results in a deletion of the chromosomal DNA between the 5′ DSB locus and the 3′ DSB locus; and wherein the first gRNA comprises a spacer sequence that is complementary to a segment of the 5′ DSB locus and the second gRNA comprises a spacer sequence that is complementary to a segment of the 3′ DSB locus.

[0485] In another method, Method 36, the present disclosure provides an in vivo method for treating a patient with one or more of Usher Syndrome Type 2A and ARRP, as provided in Method 35, wherein the two gRNAs are two sgRNAs.

[0486] In another method, Method 37, the present disclosure provides an in vivo method for treating a patient with one or more of Usher Syndrome Type 2A and ARRP, as provided in any one of Methods 35-36, wherein the two gRNAs or two sgRNAs are two modified gRNAs or two modified sgRNAs.

[0487] In another method, Method 38, the present disclosure provides an in vivo method for treating a patient with one or more of Usher Syndrome Type 2A and ARRP, as provided in any one of Methods 35-37, wherein the one or more DNA endonuclease is pre-complexed with two gRNAs or two sgRNAs.

[0488] In another method, Method 39, the present disclosure provides an in vivo method for treating a patient with one or more of Usher Syndrome Type 2A and ARRP, as provided in any one of Methods 35-38, wherein the 5′ DSB is within or near the intron 12-13 of the USH2A gene and the 3′ DSB is within or near the intron 13-14 of the USH2A gene.

[0489] In another method, Method 40, the present disclosure provides an in vivo method for treating a patient with one or more of Usher Syndrome Type 2A and ARRP, as provided in any one of Methods 35-38, wherein the 5′ DSB is within or near the intron 12-13 of the USH2A gene and the 3′ DSB is within or near the exon 13 of the USH2A gene.

[0490] In another method, Method 41, the present disclosure provides an in vivo method for treating a patient with one or more of Usher Syndrome Type 2A and ARRP, as provided in any one of Methods 35-40, wherein the deletion is a deletion of 150 bp to 7500 bp.

[0491] In another method, Method 42, the present disclosure provides an in vivo method for treating a patient with one or more of Usher Syndrome Type 2A and ARRP, as provided in any one of Methods 35-40, wherein the deletion is a deletion of 200 bp to 850 bp.

[0492] In another method, Method 43, the present disclosure provides an in vivo method for treating a patient with one or more of Usher Syndrome Type 2A and ARRP, as provided in any one of Methods 35-42, further comprising: a polynucleotide donor template comprising at least a portion of the wild-type USH2A gene.

[0493] In another method, Method 44, the present disclosure provides an in vivo method for treating a patient with one or more of Usher Syndrome Type 2A and ARRP, as provided in Method 43, wherein the at least a portion of the wild-type USH2A gene or cDNA comprises exon 13, intronic regions, or combinations thereof.

[0494] In another method, Method 45, the present disclosure provides an in vivo method for treating a patient with one or more of Usher Syndrome Type 2A and ARRP, as provided in Method 43, wherein the polynucleotide donor template comprises exon 13 of the USH2A gene and is up to 5 kb.

[0495] In another method, Method 46, the present disclosure provides an in vivo method for treating a patient with one or more of Usher Syndrome Type 2A and ARRP, as provided in Method 45, wherein the polynucleotide donor template is delivered by AAV.

[0496] In another method, Method 47, the present disclosure provides an in vivo method for treating a patient with one or more of Usher Syndrome Type 2A and ARRP, as provided in any one of Methods 20-21, or 35, wherein the Cas9 or Cpf1 mRNA, gRNA, and polynucleotide donor template are either each formulated into separate lipid nanoparticles or all co-formulated into a lipid nanoparticle.

[0497] In another method, Method 48, the present disclosure provides an in vivo method for treating a patient with one or more of Usher Syndrome Type 2A and ARRP, as provided in any one of Methods 20-21, or 35, wherein the Cas9 or Cpf1 mRNA, gRNA, and polynucleotide donor template are either each formulated into separate adeno-associated virus (AAV) vectors or all co-formulated into an AAV vector.

[0498] In another method, Method 49, the present disclosure provides an in vivo method for treating a patient with one or more of Usher Syndrome Type 2A and ARRP, as provided in any one of Methods 20-21, or 35, wherein the Cas9 or Cpf1 mRNA is formulated into a lipid nanoparticle, and both the gRNA and polynucleotide donor template are delivered to the cell by an AAV vector.

[0499] In another method, Method 50, the present disclosure provides an in vivo method for treating a patient with one or more of Usher Syndrome Type 2A and ARRP, as provided in any one of Methods 20-21, or 35, wherein the Cas9 or Cpf1 mRNA is formulated into a lipid nanoparticle, and the gRNA is delivered to the cell by electroporation and polynucleotide donor template is delivered to the cell by an AAV vector.

[0500] In another method, Method 51, the present disclosure provides an in vivo method for treating a patient with one or more of Usher Syndrome Type 2A and ARRP, as provided in any one of Methods 48-50, wherein the AAV vector is a self-inactivating AAV vector.

[0501] In another method, Method 52, the present disclosure provides a method, as provided in any one of Methods 1-51, wherein the USH2A gene is located on Chromosome 1: 215,622,893-216,423,395 (Genome Reference Consortium—GRCh38/hg38).

[0502] In another method, Method 53, the present disclosure provides a method, as provided in any one of Methods 1, 2, or 4-52, wherein the restoration of usherin protein function is compared to wild-type or normal usherin protein function.

[0503] In another method, Method 54, the present disclosure provides a method, as provided in any one of Methods 1 or 2, wherein the human cell is a photoreceptor cell or retinal progenitor cell.

[0504] In another method, Method 55, the present disclosure provides an in vivo method for treating a patient with one or more of Usher Syndrome Type 2A and ARRP, as provided in any one of Methods 3-53, wherein the cell is a photoreceptor cell or retinal progenitor cell.

[0505] In another method, Method 56, the present disclosure provides a method, as provided in Method 1, wherein the correction results in a modulation of expression or function of the USH2A gene.

[0506] In another method, Method 57, the present disclosure provides a method, as provided in Method 3, wherein the editing comprises: introducing into the cell one or more DNA endonuclease, thereby effecting one or more SSBs or DSBs within or near one or more of: intron 12-13, exon 13, and intron 13-14 of the USH2A gene that results in a modulation of expression or function of the USH2A gene and results in restoration of usherin protein function.

[0507] In another method, Method 58, the present disclosure provides a method for editing an USH2A gene containing a guanine deletion at nucleotide position c.2299, the method comprising: introducing into a human cell one or more DNA endonuclease, thereby effecting one or more SSBs or DSBs within or near one or more of: intron 12-13, exon 13, and intron 13-14 of the USH2A gene that results in a modulation of expression or function of the USH2A gene thereby creating an edited human cell.

[0508] In another method, Method 59, the present disclosure provides a method, as provided in Method 58, wherein the guanine deletion at nucleotide position c.2299 is located in exon 13 of the USH2A gene.

[0509] In another method, Method 60, the present disclosure provides a method, as provided in any one of Methods 1 or 4, further comprising: introducing into the cell one or more gRNAs wherein the one or more DNA endonuclease is one or more Cas9 or Cpf1 endonuclease that effect a pair of SSBs or DSBs, the first at a 5′ locus within or near the intron 12-13 of the USH2A gene and the second at a 3′ locus, within or near the intron 13-14 of the USH2A gene; and wherein the first guide RNA comprises a spacer sequence that is complementary to a segment of the 5′ locus and the second guide RNA comprises a spacer sequence that is complementary to a segment of the 3′ locus.

[0510] In another method, Method 61, the present disclosure provides a method, as provided in any one of Methods 1 or 4, further comprising: introducing into the cell one or more gRNAs wherein the one or more DNA endonuclease is one or more Cas9 or Cpf1 endonuclease that effect a pair of SSBs or DSBs, the first at a 5′ locus within or near the intron 12-13 of the USH2A gene and the second at a 3′ locus, within or near the exon 13 of the USH2A gene; and wherein the first guide RNA comprises a spacer sequence that is complementary to a segment of the 5′ locus and the second guide RNA comprises a spacer sequence that is complementary to a segment of the 3′ locus.

[0511] In another method, Method 62, the present disclosure provides a method, as provided in any one of Methods 1 or 4, further comprising: introducing into the cell one or more gRNAs wherein the one or more DNA endonuclease is one or more Cas9 or Cpf1 endonuclease that effect a pair of SSBs or DSBs, the first at a 5′ locus within or near the exon 13 of the USH2A gene and the second at a 3′ locus, within or near the intron 13-14 of the USH2A gene; and wherein the first guide RNA comprises a spacer sequence that is complementary to a segment of the 5′ locus and the second guide RNA comprises a spacer sequence that is complementary to a segment of the 3′ locus.

[0512] In another method, Method 63, the present disclosure provides a method, as provided in any one of Methods 1 or 4, further comprising: introducing into the cell two guide ribonucleic acid (gRNAs); wherein the one or more DNA endonuclease is one or more Cas9 or Cpf1 endonuclease that effect a pair of DSBs, the first at a 5′ DSB locus within or near the intron 12-13 of the USH2A gene and the second at a 3′ DSB locus within or near the intron 13-14 of the USH2A gene that causes a deletion of the chromosomal DNA between the 5′ DSB locus and the 3′ DSB locus that results in a deletion of the chromosomal DNA between the 5′ DSB locus and the 3′ DSB locus; and wherein the first guide RNA comprises a spacer sequence that is complementary to a segment of the 5′ DSB locus and the second guide RNA comprises a spacer sequence that is complementary to a segment of the 3′ DSB locus.

[0513] In another method, Method 64, the present disclosure provides a method, as provided in any one of Methods 1 or 4, further comprising: introducing into the cell two guide ribonucleic acid (gRNAs); wherein the one or more DNA endonuclease is one or more Cas9 or Cpf1 endonuclease that effect a pair of DSBs, the first at a 5′ DSB locus within or near the intron 12-13 of the USH2A gene and the second at a 3′ DSB locus within or near the exon 13 of the USH2A gene that causes a deletion of the chromosomal DNA between the 5′ DSB locus and the 3′ DSB locus that results in a deletion of the chromosomal DNA between the 5′ DSB locus and the 3′ DSB locus; and wherein the first guide RNA comprises a spacer sequence that is complementary to a segment of the 5′ DSB locus and the second guide RNA comprises a spacer sequence that is complementary to a segment of the 3′ DSB locus.

[0514] In another method, Method 65, the present disclosure provides a method, as provided in any one of Methods 1 or 4, further comprising: introducing into the cell two guide ribonucleic acid (gRNAs); wherein the one or more DNA endonuclease is one or more Cas9 or Cpf1 endonuclease that effect a pair of DSBs, the first at a 5′ DSB locus within or near the exon 13 of the USH2A gene and the second at a 3′ DSB locus within or near the intron 13-14 of the USH2A gene that causes a deletion of the chromosomal DNA between the 5′ DSB locus and the 3′ DSB locus that results in a deletion of the chromosomal DNA between the 5′ DSB locus and the 3′ DSB locus; and wherein the first guide RNA comprises a spacer sequence that is complementary to a segment of the 5′ DSB locus and the second guide RNA comprises a spacer sequence that is complementary to a segment of the 3′ DSB locus.

[0515] In another method, Method 66, the present disclosure provides a method for editing an USH2A gene containing a guanine deletion at nucleotide position c.2299 as provided in Method 1, wherein the human cell has defective activity and the edited human cell expresses a functional usherin.

[0516] In another method, Method 67, the present disclosure provides a method for editing an USH2A gene containing a guanine deletion at nucleotide position c.2299, the method comprising: deleting a sequence comprising the guanine deletion at nucleotide position c.2299 of the USH2A gene in a cell using a first gRNA or sgRNA comprising SEQ ID NO: 5295 and a second gRNA or sgRNA comprising SEQ ID NO: 5313.

[0517] In another method, Method 68, the present disclosure provides a method for editing an USH2A gene containing a guanine deletion at nucleotide position c.2299 as provided in Method 67
[0518] wherein the deleting results in a deletion of 827 bp.

[0519] In another method, Method 69, the present disclosure provides a method for treating a patient with an USH2A gene containing a guanine deletion at nucleotide position c.2299, the method comprising: administering a first gRNA or sgRNA and second gRNA or sgRNA to the patient, wherein the first gRNA or sgRNA comprises SEQ ID NO: 5295 and the second gRNA or sgRNA comprises SEQ ID NO: 5313.

[0520] In another method, Method 70, the present disclosure provides a method for treating a patient with an USH2A gene containing a guanine deletion at nucleotide position c.2299 as provided in Method 69, wherein the first gRNA or sgRNA and second gRNA or sgRNA are administered simultaneously; the first gRNA or sgRNA is administered prior to the second gRNA or sgRNA; or the second gRNA or sgRNA is administered prior to the first gRNA or sgRNA.

[0521] In another method, Method 71, the present disclosure provides a method for editing an USH2A gene containing a guanine deletion at nucleotide position c.2299, the method comprising: deleting a sequence comprising the guanine deletion at nucleotide position c.2299 of the USH2A gene in a cell using a first gRNA or sgRNA comprising SEQ ID NO: 5295 and a second gRNA or sgRNA comprising SEQ ID NO: 5314.

[0522] In another method, Method 72, the present disclosure provides a method for editing an USH2A gene containing a guanine deletion at nucleotide position c.2299 as provided in Method 71, wherein the deleting results in a deletion of 847 bp.

[0523] In another method, Method 73, the present disclosure provides a method for treating a patient with an USH2A gene containing a guanine deletion at nucleotide position c.2299, the method comprising: administering a first gRNA or sgRNA and second gRNA or sgRNA to the patient, wherein the first gRNA or sgRNA comprises SEQ ID NO: 5295 and the second gRNA or sgRNA comprises SEQ ID NO: 5314.

[0524] In another method, Method 74, the present disclosure provides a method for treating a patient with an USH2A gene containing a guanine deletion at nucleotide position c.2299 as provided in Method 73, wherein the first gRNA or sgRNA and second gRNA or sgRNA are administered simultaneously; the first gRNA or sgRNA is administered prior to the second gRNA or sgRNA; or the second gRNA or sgRNA is administered prior to the first gRNA or sgRNA.

[0525] In another method, Method 75, the present disclosure provides a method for editing an USH2A gene containing a guanine deletion at nucleotide position c.2299, the method comprising: deleting a sequence comprising the guanine deletion at nucleotide position c.2299 of the USH2A gene in a cell using a first gRNA or sgRNA comprising SEQ ID NO: 5299 and a second gRNA or sgRNA comprising SEQ ID NO: 5313.

[0526] In another method, Method 76, the present disclosure provides a method for editing an USH2A gene containing a guanine deletion at nucleotide position c.2299 as provided in Method 75, wherein the deleting results in a deletion of 825 bp.

[0527] In another method, Method 77, the present disclosure provides a method for treating a patient with an USH2A gene containing a guanine deletion at nucleotide position c.2299, the method comprising: administering a first gRNA or sgRNA and second gRNA or sgRNA to the patient, wherein the first gRNA or sgRNA comprises SEQ ID NO: 5299 and the second gRNA or sgRNA comprises SEQ ID NO: 5313.

[0528] In another method, Method 78, the present disclosure provides a method for treating a patient with an USH2A gene containing a guanine deletion at nucleotide position c.2299 as provided in Method 77, wherein the first gRNA or sgRNA and second gRNA or sgRNA are administered simultaneously; the first gRNA or sgRNA is administered prior to the second gRNA or sgRNA; or the second gRNA or sgRNA is administered prior to the first gRNA or sgRNA.

[0529] In another method, Method 79, the present disclosure provides a method for editing an USH2A gene containing a guanine deletion at nucleotide position c.2299, the method comprising: deleting a sequence comprising the guanine deletion at nucleotide position c.2299 of the USH2A gene in a cell using a first gRNA or sgRNA comprising SEQ ID NO: 5299 and a second gRNA or sgRNA comprising SEQ ID NO: 5314.

[0530] In another method, Method 80, the present disclosure provides a method for editing an USH2A gene containing a guanine deletion at nucleotide position c.2299 as provided in Method 79, wherein the deleting results in a deletion of 845 bp.

[0531] In another method, Method 81, the present disclosure provides a method for treating a patient with an USH2A gene containing a guanine deletion at nucleotide position c.2299, the method comprising: administering a first gRNA or sgRNA and second gRNA or sgRNA to the patient, wherein the first gRNA or sgRNA comprises SEQ ID NO: 5299 and the second gRNA or sgRNA comprises SEQ ID NO: 5314.

[0532] In another method, Method 82, the present disclosure provides a method for treating a patient with an USH2A gene containing a guanine deletion at nucleotide position c.2299 as provided in Method 81, wherein the first gRNA or sgRNA and second gRNA or sgRNA are administered simultaneously; the first gRNA or sgRNA is administered prior to the second gRNA or sgRNA; or the second gRNA or sgRNA is administered prior to the first gRNA or sgRNA.

[0533] In another method, Method 83, the present disclosure provides a method for editing an USH2A gene containing a guanine deletion at nucleotide position c.2299, the method comprising: deleting a sequence comprising the guanine deletion at nucleotide position c.2299 of the USH2A gene in a cell using a first gRNA or sgRNA comprising SEQ ID NO: 5295 and a second gRNA or sgRNA comprising SEQ ID NO: 5276.

[0534] In another method, Method 84, the present disclosure provides a method for editing an USH2A gene containing a guanine deletion at nucleotide position c.2299 as provided in Method 83, wherein the deleting results in a deletion of 251 bp.

[0535] In another method, Method 85, the present disclosure provides a method for treating a patient with an USH2A gene containing a guanine deletion at nucleotide position c.2299, the method comprising: administering a first gRNA or sgRNA and second gRNA or sgRNA to the patient, wherein the first gRNA or sgRNA comprises SEQ ID NO: 5295 and the second gRNA or sgRNA comprises SEQ ID NO: 5276.

[0536] In another method, Method 86, the present disclosure provides a method for treating a patient with an USH2A gene containing a guanine deletion at nucleotide position c.2299 as provided in Method 85, wherein the first gRNA or sgRNA and second gRNA or sgRNA are administered simultaneously; the first gRNA or sgRNA is administered prior to the second gRNA or sgRNA; or the second gRNA or sgRNA is administered prior to the first gRNA or sgRNA.

[0537] In another method, Method 87, the present disclosure provides a method for editing an USH2A gene containing a guanine deletion at nucleotide position c.2299, the method comprising: deleting a sequence comprising the guanine deletion at nucleotide position c.2299 of the USH2A gene in a cell using a first gRNA or sgRNA comprising SEQ ID NO: 5295 and a second gRNA or sgRNA comprising SEQ ID NO: 5275.

[0538] In another method, Method 88, the present disclosure provides a method for editing an USH2A gene containing a guanine deletion at nucleotide position c.2299 as provided in Method 87, wherein the deleting results in a deletion of 250 bp.

[0539] In another method, Method 89, the present disclosure provides a method for treating a patient with an USH2A gene containing a guanine deletion at nucleotide position c.2299, the method comprising: administering a first gRNA or sgRNA and second gRNA or sgRNA to the patient, wherein the first gRNA or sgRNA comprises SEQ ID NO: 5295 and the second gRNA or sgRNA comprises SEQ ID NO: 5275.

[0540] In another method, Method 90, the present disclosure provides a method for treating a patient with an USH2A gene containing a guanine deletion at nucleotide position c.2299 as provided in Method 89, wherein the first gRNA or sgRNA and second gRNA or sgRNA are administered simultaneously; the first gRNA or sgRNA is administered prior to the second gRNA or sgRNA; or the second gRNA or sgRNA is administered prior to the first gRNA or sgRNA.

[0541] In another method, Method 91, the present disclosure provides a method for editing an USH2A gene containing a guanine deletion at nucleotide position c.2299, the method comprising: deleting a sequence comprising the guanine deletion at nucleotide position c.2299 of the USH2A gene in a cell using a first gRNA or sgRNA comprising SEQ ID NO: 5295 and a second gRNA or sgRNA comprising SEQ ID NO: 5277.

[0542] In another method, Method 92, the present disclosure provides a method for editing an USH2A gene containing a guanine deletion at nucleotide position c.2299 as provided in Method 91, wherein the deleting results in a deletion of 285 bp.

[0543] In another method, Method 93, the present disclosure provides a method for treating a patient with an USH2A gene containing a guanine deletion at nucleotide position c.2299, the method comprising: administering a first gRNA or sgRNA and second gRNA or sgRNA to the patient, wherein the first gRNA or sgRNA comprises SEQ ID NO: 5295 and the second gRNA or sgRNA comprises SEQ ID NO: 5277.

[0544] In another method, Method 94, the present disclosure provides a method for treating a patient with an USH2A gene containing a guanine deletion at nucleotide position c.2299 as provided in Method 93, wherein the first gRNA or sgRNA and second gRNA or sgRNA are administered simultaneously; the first gRNA or sgRNA is administered prior to the second gRNA or sgRNA; or the second gRNA or sgRNA is administered prior to the first gRNA or sgRNA.

[0545] In another method, Method 95, the present disclosure provides a method for editing an USH2A gene containing a guanine deletion at nucleotide position c.2299, the method comprising: deleting a sequence comprising the guanine deletion at nucleotide position c.2299 of the USH2A gene in a cell using a first gRNA or sgRNA comprising SEQ ID NO: 5295 and a second gRNA or sgRNA comprising SEQ ID NO: 5278.

[0546] In another method, Method 96, the present disclosure provides a method for editing an USH2A gene containing a guanine deletion at nucleotide position c.2299 as provided in Method 95, wherein the deleting results in a deletion of 339 bp.

[0547] In another method, Method 97, the present disclosure provides a method for treating a patient with an USH2A gene containing a guanine deletion at nucleotide position c.2299, the method comprising: administering a first gRNA or sgRNA and second gRNA or sgRNA to the patient, wherein the first gRNA or sgRNA comprises SEQ ID NO: 5295 and the second gRNA or sgRNA comprises SEQ ID NO: 5278.

[0548] In another method, Method 98, the present disclosure provides a method for treating a patient with an USH2A gene containing a guanine deletion at nucleotide position c.2299 as provided in Method 97, wherein the first gRNA or sgRNA and second gRNA or sgRNA are administered simultaneously; the first gRNA or sgRNA is administered prior to the second gRNA or sgRNA; or the second gRNA or sgRNA is administered prior to the first gRNA or sgRNA.

[0549] In another method, Method 99, the present disclosure provides a method for editing an USH2A gene containing a guanine deletion at nucleotide position c.2299, the method comprising: deleting a sequence comprising the guanine deletion at nucleotide position c.2299 of the USH2A gene in a cell using a first gRNA or sgRNA comprising SEQ ID NO: 5295 and a second gRNA or sgRNA comprising SEQ ID NO: 5287.

[0550] In another method, Method 100, the present disclosure provides a method for editing an USH2A gene containing a guanine deletion at nucleotide position c.2299 as provided in Method 99, wherein the deleting results in a deletion of 398 bp.

[0551] In another method, Method 101, the present disclosure provides a method for treating a patient with an USH2A gene containing a guanine deletion at nucleotide position c.2299, the method comprising: administering a first gRNA or sgRNA and second gRNA or sgRNA to the patient, wherein the first gRNA or sgRNA comprises SEQ ID NO: 5295 and the second gRNA or sgRNA comprises SEQ ID NO: 5287.

[0552] In another method, Method 102, the present disclosure provides a method for treating a patient with an USH2A gene containing a guanine deletion at nucleotide position c.2299 as provided in Method 101, wherein the first gRNA or sgRNA and second gRNA or sgRNA are administered simultaneously; the first gRNA or sgRNA is administered prior to the second gRNA or sgRNA; or the second gRNA or sgRNA is administered prior to the first gRNA or sgRNA.

[0553] In another method, Method 103, the present disclosure provides a method for editing an USH2A gene containing a guanine deletion at nucleotide position c.2299, the method comprising: deleting a sequence comprising the guanine deletion at nucleotide position c.2299 of the USH2A gene in a cell using a first gRNA or sgRNA comprising SEQ ID NO: 5295 and a second gRNA or sgRNA comprising SEQ ID NO: 5286.

[0554] In another method, Method 104, the present disclosure provides a method for editing an USH2A gene containing a guanine deletion at nucleotide position c.2299 as provided in Method 103, wherein the deleting results in a deletion of 397 bp.

[0555] In another method, Method 105, the present disclosure provides a method for treating a patient with an USH2A gene containing a guanine deletion at nucleotide position c.2299, the method comprising: administering a first gRNA or sgRNA and second gRNA or sgRNA to the patient, wherein the first gRNA or sgRNA comprises SEQ ID NO: 5295 and the second gRNA or sgRNA comprises SEQ ID NO: 5286.

[0556] In another method, Method 106, the present disclosure provides a method for treating a patient with an USH2A gene containing a guanine deletion at nucleotide position c.2299 as provided in Method 105, wherein the first gRNA or sgRNA and second gRNA or sgRNA are administered simultaneously; the first gRNA or sgRNA is administered prior to the second gRNA or sgRNA; or the second gRNA or sgRNA is administered prior to the first gRNA or sgRNA.

[0557] In another method, Method 107, the present disclosure provides a method for editing an USH2A gene containing a guanine deletion at nucleotide position c.2299, the method comprising: deleting a sequence comprising the guanine deletion at nucleotide position c.2299 of the USH2A gene in a cell using a first gRNA or sgRNA comprising SEQ ID NO: 5295 and a second gRNA or sgRNA comprising SEQ ID NO: 5290.

[0558] In another method, Method 108, the present disclosure provides a method for editing an USH2A gene containing a guanine deletion at nucleotide position c.2299 as provided in Method 107, wherein the deleting results in a deletion of 450 bp.

[0559] In another method, Method 109, the present disclosure provides a method for treating a patient with an USH2A gene containing a guanine deletion at nucleotide position c.2299, the method comprising: administering a first gRNA or sgRNA and second gRNA or sgRNA to the patient, wherein the first gRNA or sgRNA comprises SEQ ID NO: 5295 and the second gRNA or sgRNA comprises SEQ ID NO: 5290.

[0560] In another method, Method 110, the present disclosure provides a method for treating a patient with an USH2A gene containing a guanine deletion at nucleotide position c.2299 as provided in Method 109, wherein the first gRNA or sgRNA and second gRNA or sgRNA are administered simultaneously; the first gRNA or sgRNA is administered prior to the second gRNA or sgRNA; or the second gRNA or sgRNA is administered prior to the first gRNA or sgRNA.

[0561] In another method, Method 111, the present disclosure provides a method for editing an USH2A gene containing a guanine deletion at nucleotide position c.2299, the method comprising: deleting a sequence comprising the guanine deletion at nucleotide position c.2299 of the USH2A gene in a cell using a first gRNA or sgRNA comprising SEQ ID NO: 5295 and a second gRNA or sgRNA comprising SEQ ID NO: 5291.

[0562] In another method, Method 112, the present disclosure provides a method for editing an USH2A gene containing a guanine deletion at nucleotide position c.2299 as provided in Method 111, wherein the deleting results in a deletion of 470 bp.

[0563] In another method, Method 113, the present disclosure provides a method for treating a patient with an USH2A gene containing a guanine deletion at nucleotide position c.2299, the method comprising: administering a first gRNA or sgRNA and second gRNA or sgRNA to the patient, wherein the first gRNA or sgRNA comprises SEQ ID NO: 5295 and the second gRNA or sgRNA comprises SEQ ID NO: 5291.

[0564] In another method, Method 114, the present disclosure provides a method for treating a patient with an USH2A gene containing a guanine deletion at nucleotide position c.2299 as provided in Method 113, wherein the first gRNA or sgRNA and second gRNA or sgRNA are administered simultaneously; the first gRNA or sgRNA is administered prior to the second gRNA or sgRNA; or the second gRNA or sgRNA is administered prior to the first gRNA or sgRNA.

[0565] In another method, Method 115, the present disclosure provides a method for editing an USH2A gene containing a guanine deletion at nucleotide position c.2299, the method comprising: deleting a sequence comprising the guanine deletion at nucleotide position c.2299 of the USH2A gene in a cell using a first gRNA or sgRNA comprising SEQ ID NO: 5295 and a second gRNA or sgRNA comprising SEQ ID NO: 5292.

[0566] In another method, Method 116, the present disclosure provides a method for editing an USH2A gene containing a guanine deletion at nucleotide position c.2299 as provided in Method 115, wherein the deleting results in a deletion of 506 bp.

[0567] In another method, Method 117, the present disclosure provides a method for treating a patient with an USH2A gene containing a guanine deletion at nucleotide position c.2299, the method comprising: administering a first gRNA or sgRNA and second gRNA or sgRNA to the patient, wherein the first gRNA or sgRNA comprises SEQ ID NO: 5295 and the second gRNA or sgRNA comprises SEQ ID NO: 5292.

[0568] In another method, Method 118, the present disclosure provides a method for treating a patient with an USH2A gene containing a guanine deletion at nucleotide position c.2299 as provided in Method 117, wherein the first gRNA or sgRNA and second gRNA or sgRNA are administered simultaneously; the first gRNA or sgRNA is administered prior to the second gRNA or sgRNA; or the second gRNA or sgRNA is administered prior to the first gRNA or sgRNA.

[0569] In another method, Method 119, the present disclosure provides a method for editing an USH2A gene containing a guanine deletion at nucleotide position c.2299, the method comprising: deleting a sequence comprising the guanine deletion at nucleotide position c.2299 of the USH2A gene in a cell using a first gRNA or sgRNA comprising SEQ ID NO: 5295 and a second gRNA or sgRNA comprising SEQ ID NO: 5294.

[0570] In another method, Method 120, the present disclosure provides a method for editing an USH2A gene containing a guanine deletion at nucleotide position c.2299 as provided in Method 119, wherein the deleting results in a deletion of 529 bp.

[0571] In another method, Method 121, the present disclosure provides a method for treating a patient with an USH2A gene containing a guanine deletion at nucleotide position c.2299, the method comprising: administering a first gRNA or sgRNA and second gRNA or sgRNA to the patient, wherein the first gRNA or sgRNA comprises SEQ ID NO: 5295 and the second gRNA or sgRNA comprises SEQ ID NO: 5294.

[0572] In another method, Method 122, the present disclosure provides a method for treating a patient with an USH2A gene containing a guanine deletion at nucleotide position c.2299 as provided in Method 121, wherein the first gRNA or sgRNA and second gRNA or sgRNA are administered simultaneously; the first gRNA or sgRNA is administered prior to the second gRNA or sgRNA; or the second gRNA or sgRNA is administered prior to the first gRNA or sgRNA.

[0573] In another method, Method 123, the present disclosure provides a method for editing an USH2A gene containing a guanine deletion at nucleotide position c.2299, the method comprising: deleting a sequence comprising the guanine deletion at nucleotide position c.2299 of the USH2A gene in a cell using a first gRNA or sgRNA comprising SEQ ID NO: 5295 and a second gRNA or sgRNA comprising SEQ ID NO: 5296.

[0574] In another method, Method 124, the present disclosure provides a method for editing an USH2A gene containing a guanine deletion at nucleotide position c.2299 as provided in Method 69, wherein the deleting results in a deletion of 617 bp.

[0575] In another method, Method 125, the present disclosure provides a method for treating a patient with an USH2A gene containing a guanine deletion at nucleotide position c.2299, the method comprising: administering a first gRNA or sgRNA and second gRNA or sgRNA to the patient, wherein the first gRNA or sgRNA comprises SEQ ID NO: 5295 and the second gRNA or sgRNA comprises SEQ ID NO: 5296.

[0576] In another method, Method 126, the present disclosure provides a method for treating a patient with an USH2A gene containing a guanine deletion at nucleotide position c.2299 as provided in Method 125, wherein the first gRNA or sgRNA and second gRNA or sgRNA are administered simultaneously; the first gRNA or sgRNA is administered prior to the second gRNA or sgRNA; or the second gRNA or sgRNA is administered prior to the first gRNA or sgRNA.

[0577] In another method, Method 127, the present disclosure provides a method for editing an USH2A gene containing a guanine deletion at nucleotide position c.2299, the method comprising: deleting a sequence comprising the guanine deletion at nucleotide position c.2299 of the USH2A gene in a cell using a first gRNA or sgRNA comprising SEQ ID NO: 5295 and a second gRNA or sgRNA comprising SEQ ID NO: 5302.

[0578] In another method, Method 128, the present disclosure provides a method for editing an USH2A gene containing a guanine deletion at nucleotide position c.2299 as provided in Method 127, wherein the deleting results in a deletion of 675 bp.

[0579] In another method, Method 129, the present disclosure provides a method for treating a patient with an USH2A gene containing a guanine deletion at nucleotide position c.2299, the method comprising: administering a first gRNA or sgRNA and second gRNA or sgRNA to the patient, wherein the first gRNA or sgRNA comprises SEQ ID NO: 5295 and the second gRNA or sgRNA comprises SEQ ID NO: 5302.

[0580] In another method, Method 130, the present disclosure provides a method for treating a patient with an USH2A gene containing a guanine deletion at nucleotide position c.2299 as provided in Method 129, wherein the first gRNA or sgRNA and second gRNA or sgRNA are administered simultaneously; the first gRNA or sgRNA is administered prior to the second gRNA or sgRNA; or the second gRNA or sgRNA is administered prior to the first gRNA or sgRNA.

[0581] In another method, Method 131, the present disclosure provides a method for editing an USH2A gene containing a guanine deletion at nucleotide position c.2299, the method comprising: deleting a sequence comprising the guanine deletion at nucleotide position c.2299 of the USH2A gene in a cell using a first gRNA or sgRNA comprising SEQ ID NO: 5295 and a second gRNA or sgRNA comprising SEQ ID NO: 5310.

[0582] In another method, Method 132, the present disclosure provides a method for editing an USH2A gene containing a guanine deletion at nucleotide position c.2299 as provided in Method 131, wherein the deleting results in a deletion of 730 bp.

[0583] In another method, Method 133, the present disclosure provides a method for treating a patient with an USH2A gene containing a guanine deletion at nucleotide position c.2299, the method comprising: administering a first gRNA or sgRNA and second gRNA or sgRNA to the patient, wherein the first gRNA or sgRNA comprises SEQ ID NO: 5295 and the second gRNA or sgRNA comprises SEQ ID NO: 5310.

[0584] In another method, Method 134, the present disclosure provides a method for treating a patient with an USH2A gene containing a guanine deletion at nucleotide position c.2299 as provided in Method 133, wherein the first gRNA or sgRNA and second gRNA or sgRNA are administered simultaneously; the first gRNA or sgRNA is administered prior to the second gRNA or sgRNA; or the second gRNA or sgRNA is administered prior to the first gRNA or sgRNA.

[0585] In another method, Method 135, the present disclosure provides a method for editing an USH2A gene containing a guanine deletion at nucleotide position c.2299, the method comprising: deleting a sequence comprising the guanine deletion at nucleotide position c.2299 of the USH2A gene in a cell using a first gRNA or sgRNA comprising SEQ ID NO: 5299 and a second gRNA or sgRNA comprising SEQ ID NO: 5276.

[0586] In another method, Method 136, the present disclosure provides a method for editing an USH2A gene containing a guanine deletion at nucleotide position c.2299 as provided in Method 135, wherein the deleting results in a deletion of 249 bp.

[0587] In another method, Method 137, the present disclosure provides a method for treating a patient with an USH2A gene containing a guanine deletion at nucleotide position c.2299, the method comprising: administering a first gRNA or sgRNA and second gRNA or sgRNA to the patient, wherein the first gRNA or sgRNA comprises SEQ ID NO: 5299 and the second gRNA or sgRNA comprises SEQ ID NO: 5276.

[0588] In another method, Method 138, the present disclosure provides a method for treating a patient with an USH2A gene containing a guanine deletion at nucleotide position c.2299 as provided in Method 137, wherein the first gRNA or sgRNA and second gRNA or sgRNA are administered simultaneously; the first gRNA or sgRNA is administered prior to the second gRNA or sgRNA; or the second gRNA or sgRNA is administered prior to the first gRNA or sgRNA.

[0589] In another method, Method 139, the present disclosure provides a method for editing an USH2A gene containing a guanine deletion at nucleotide position c.2299, the method comprising: deleting a sequence comprising the guanine deletion at nucleotide position c.2299 of the USH2A gene in a cell using a first gRNA or sgRNA comprising SEQ ID NO: 5299 and a second gRNA or sgRNA comprising SEQ ID NO: 5275.

[0590] In another method, Method 140, the present disclosure provides a method for editing an USH2A gene containing a guanine deletion at nucleotide position c.2299 as provided in Method 139, wherein the deleting results in a deletion of 248 bp.

[0591] In another method, Method 141, the present disclosure provides a method for treating a patient with an USH2A gene containing a guanine deletion at nucleotide position c.2299, the method comprising: administering a first gRNA or sgRNA and second gRNA or sgRNA to the patient, wherein the first gRNA or sgRNA comprises SEQ ID NO: 5299 and the second gRNA or sgRNA comprises SEQ ID NO: 5275.

[0592] In another method, Method 142, the present disclosure provides a method for treating a patient with an USH2A gene containing a guanine deletion at nucleotide position c.2299 as provided in Method 141, wherein the first gRNA or sgRNA and second gRNA or sgRNA are administered simultaneously; the first gRNA or sgRNA is administered prior to the second gRNA or sgRNA; or the second gRNA or sgRNA is administered prior to the first gRNA or sgRNA.

[0593] In another method, Method 143, the present disclosure provides a method for editing an USH2A gene containing a guanine deletion at nucleotide position c.2299, the method comprising: deleting a sequence comprising the guanine deletion at nucleotide position c.2299 of the USH2A gene in a cell using a first gRNA or sgRNA comprising SEQ ID NO: 5299 and a second gRNA or sgRNA comprising SEQ ID NO: 5277.

[0594] In another method, Method 144, the present disclosure provides a method for editing an USH2A gene containing a guanine deletion at nucleotide position c.2299 as provided in Method 143, wherein the deleting results in a deletion of 283 bp.

[0595] In another method, Method 145, the present disclosure provides a method for treating a patient with an USH2A gene containing a guanine deletion at nucleotide position c.2299, the method comprising: administering a first gRNA or sgRNA and second gRNA or sgRNA to the patient, wherein the first gRNA or sgRNA comprises SEQ ID NO: 5299 and the second gRNA or sgRNA comprises SEQ ID NO: 5277.

[0596] In another method, Method 146, the present disclosure provides a method for treating a patient with an USH2A gene containing a guanine deletion at nucleotide position c.2299 as provided in Method 145, wherein the first gRNA or sgRNA and second gRNA or sgRNA are administered simultaneously; the first gRNA or sgRNA is administered prior to the second gRNA or sgRNA; or the second gRNA or sgRNA is administered prior to the first gRNA or sgRNA.

[0597] In another method, Method 147, the present disclosure provides a method for editing an USH2A gene containing a guanine deletion at nucleotide position c.2299, the method comprising: deleting a sequence comprising the guanine deletion at nucleotide position c.2299 of the USH2A gene in a cell using a first gRNA or sgRNA comprising SEQ ID NO: 5299 and a second gRNA or sgRNA comprising SEQ ID NO: 5278.

[0598] In another method, Method 148, the present disclosure provides a method for editing an USH2A gene containing a guanine deletion at nucleotide position c.2299 as provided in Method 147, wherein the deleting results in a deletion of 337 bp.

[0599] In another method, Method 149, the present disclosure provides a method for treating a patient with an USH2A gene containing a guanine deletion at nucleotide position c.2299, the method comprising: administering a first gRNA or sgRNA and second gRNA or sgRNA to the patient, wherein the first gRNA or sgRNA comprises SEQ ID NO: 5299 and the second gRNA or sgRNA comprises SEQ ID NO: 5278.

[0600] In another method, Method 150, the present disclosure provides a method for treating a patient with an USH2A gene containing a guanine deletion at nucleotide position c.2299 as provided in Method 149, wherein the first gRNA or sgRNA and second gRNA or sgRNA are administered simultaneously; the first gRNA or sgRNA is administered prior to the second gRNA or sgRNA; or the second gRNA or sgRNA is administered prior to the first gRNA or sgRNA.

[0601] In another method, Method 151, the present disclosure provides a method for editing an USH2A gene containing a guanine deletion at nucleotide position c.2299, the method comprising: deleting a sequence comprising the guanine deletion at nucleotide position c.2299 of the USH2A gene in a cell using a first gRNA or sgRNA comprising SEQ ID NO: 5299 and a second gRNA or sgRNA comprising SEQ ID NO: 5287.

[0602] In another method, Method 152, the present disclosure provides a method for editing an USH2A gene containing a guanine deletion at nucleotide position c.2299 as provided in Method 151, wherein the deleting results in a deletion of 396 bp.

[0603] In another method, Method 153, the present disclosure provides a method for treating a patient with an USH2A gene containing a guanine deletion at nucleotide position c.2299, the method comprising: administering a first gRNA or sgRNA and second gRNA or sgRNA to the patient, wherein the first gRNA or sgRNA comprises SEQ ID NO: 5299 and the second gRNA or sgRNA comprises SEQ ID NO: 5287.

[0604] In another method, Method 154, the present disclosure provides a method for treating a patient with an USH2A gene containing a guanine deletion at nucleotide position c.2299 as provided in Method 153, wherein the first gRNA or sgRNA and second gRNA or sgRNA are administered simultaneously; the first gRNA or sgRNA is administered prior to the second gRNA or sgRNA; or the second gRNA or sgRNA is administered prior to the first gRNA or sgRNA.

[0605] In another method, Method 155, the present disclosure provides a method for editing an USH2A gene containing a guanine deletion at nucleotide position c.2299, the method comprising: deleting a sequence comprising the guanine deletion at nucleotide position c.2299 of the USH2A gene in a cell using a first gRNA or sgRNA comprising SEQ ID NO: 5299 and a second gRNA or sgRNA comprising SEQ ID NO: 5286.

[0606] In another method, Method 156, the present disclosure provides a method for editing an USH2A gene containing a guanine deletion at nucleotide position c.2299 as provided in Method 155, wherein the deleting results in a deletion of 395 bp.

[0607] In another method, Method 157, the present disclosure provides a method for treating a patient with an USH2A gene containing a guanine deletion at nucleotide position c.2299, the method comprising: administering a first gRNA or sgRNA and second gRNA or sgRNA to the patient, wherein the first gRNA or sgRNA comprises SEQ ID NO: 5299 and the second gRNA or sgRNA comprises SEQ ID NO: 5286.

[0608] In another method, Method 158, the present disclosure provides a method for treating a patient with an USH2A gene containing a guanine deletion at nucleotide position c.2299 as provided in Method 157, wherein the first gRNA or sgRNA and second gRNA or sgRNA are administered simultaneously; the first gRNA or sgRNA is administered prior to the second gRNA or sgRNA; or the second gRNA or sgRNA is administered prior to the first gRNA or sgRNA.

[0609] In another method, Method 159, the present disclosure provides a method for editing an USH2A gene containing a guanine deletion at nucleotide position c.2299, the method comprising: deleting a sequence comprising the guanine deletion at nucleotide position c.2299 of the USH2A gene in a cell using a first gRNA or sgRNA comprising SEQ ID NO: 5299 and a second gRNA or sgRNA comprising SEQ ID NO: 5290.

[0610] In another method, Method 160, the present disclosure provides a method for editing an USH2A gene containing a guanine deletion at nucleotide position c.2299 as provided in Method 159, wherein the deleting results in a deletion of 448 bp.

[0611] In another method, Method 161, the present disclosure provides a method for treating a patient with an USH2A gene containing a guanine deletion at nucleotide position c.2299, the method comprising: administering a first gRNA or sgRNA and second gRNA or sgRNA to the patient, wherein the first gRNA or sgRNA comprises SEQ ID NO: 5299 and the second gRNA or sgRNA comprises SEQ ID NO: 5290.

[0612] In another method, Method 162, the present disclosure provides a method for treating a patient with an USH2A gene containing a guanine deletion at nucleotide position c.2299 as provided in Method 161, wherein the first gRNA or sgRNA and second gRNA or sgRNA are administered simultaneously; the first gRNA or sgRNA is administered prior to the second gRNA or sgRNA; or the second gRNA or sgRNA is administered prior to the first gRNA or sgRNA.

[0613] In another method, Method 163, the present disclosure provides a method for editing an USH2A gene containing a guanine deletion at nucleotide position c.2299, the method comprising: deleting a sequence comprising the guanine deletion at nucleotide position c.2299 of the USH2A gene in a cell using a first gRNA or sgRNA comprising SEQ ID NO: 5299 and a second gRNA or sgRNA comprising SEQ ID NO: 5291.

[0614] In another method, Method 164, the present disclosure provides a method for editing an USH2A gene containing a guanine deletion at nucleotide position c.2299 as provided in Method 163, wherein the deleting results in a deletion of 468 bp.

[0615] In another method, Method 165, the present disclosure provides a method for treating a patient with an USH2A gene containing a guanine deletion at nucleotide position c.2299, the method comprising: administering a first gRNA or sgRNA and second gRNA or sgRNA to the patient, wherein the first gRNA or sgRNA comprises SEQ ID NO: 5299 and the second gRNA or sgRNA comprises SEQ ID NO: 5291.

[0616] In another method, Method 166, the present disclosure provides a method for treating a patient with an USH2A gene containing a guanine deletion at nucleotide position c.2299 as provided in Method 165, wherein the first gRNA or sgRNA and second gRNA or sgRNA are administered simultaneously; the first gRNA or sgRNA is administered prior to the second gRNA or sgRNA; or the second gRNA or sgRNA is administered prior to the first gRNA or sgRNA.

[0617] In another method, Method 167, the present disclosure provides a method for editing an USH2A gene containing a guanine deletion at nucleotide position c.2299, the method comprising: deleting a sequence comprising the guanine deletion at nucleotide position c.2299 of the USH2A gene in a cell using a first gRNA or sgRNA comprising SEQ ID NO: 5299 and a second gRNA or sgRNA comprising SEQ ID NO: 5292.

[0618] In another method, Method 168, the present disclosure provides a method for editing an USH2A gene containing a guanine deletion at nucleotide position c.2299 as provided in Method 167, wherein the deleting results in a deletion of 504 bp.

[0619] In another method, Method 169, the present disclosure provides a method for treating a patient with an USH2A gene containing a guanine deletion at nucleotide position c.2299, the method comprising: administering a first gRNA or sgRNA and second gRNA or sgRNA to the patient, wherein the first gRNA or sgRNA comprises SEQ ID NO: 5299 and the second gRNA or sgRNA comprises SEQ ID NO: 5292.

[0620] In another method, Method 170, the present disclosure provides a method for treating a patient with an USH2A gene containing a guanine deletion at nucleotide position c.2299 as provided in Method 169, wherein the first gRNA or sgRNA and second gRNA or sgRNA are administered simultaneously; the first gRNA or sgRNA is administered prior to the second gRNA or sgRNA; or the second gRNA or sgRNA is administered prior to the first gRNA or sgRNA.

[0621] In another method, Method 171, the present disclosure provides a method for editing an USH2A gene containing a guanine deletion at nucleotide position c.2299, the method comprising: deleting a sequence comprising the guanine deletion at nucleotide position c.2299 of the USH2A gene in a cell using a first gRNA or sgRNA comprising SEQ ID NO: 5299 and a second gRNA or sgRNA comprising SEQ ID NO: 5294.

[0622] In another method, Method 172, the present disclosure provides a method for editing an USH2A gene containing a guanine deletion at nucleotide position c.2299 as provided in Method 171, wherein the deleting results in a deletion of 527 bp.

[0623] In another method, Method 173, the present disclosure provides a method for treating a patient with an USH2A gene containing a guanine deletion at nucleotide position c.2299, the method comprising: administering a first gRNA or sgRNA and second gRNA or sgRNA to the patient, wherein the first gRNA or sgRNA comprises SEQ ID NO: 5299 and the second gRNA or sgRNA comprises SEQ ID NO: 5294.

[0624] In another method, Method 174, the present disclosure provides a method for treating a patient with an USH2A gene containing a guanine deletion at nucleotide position c.2299 as provided in Method 173, wherein the first gRNA or sgRNA and second gRNA or sgRNA are administered simultaneously; the first gRNA or sgRNA is administered prior to the second gRNA or sgRNA; or the second gRNA or sgRNA is administered prior to the first gRNA or sgRNA.

[0625] In another method, Method 175, the present disclosure provides a method for editing an USH2A gene containing a guanine deletion at nucleotide position c.2299, the method comprising: deleting a sequence comprising the guanine deletion at nucleotide position c.2299 of the USH2A gene in a cell using a first gRNA or sgRNA comprising SEQ ID NO: 5299 and a second gRNA or sgRNA comprising SEQ ID NO: 5296.

[0626] In another method, Method 176, the present disclosure provides a method for editing an USH2A gene containing a guanine deletion at nucleotide position c.2299 as provided in Method 175, wherein the deleting results in a deletion of 615 bp.

[0627] In another method, Method 177, the present disclosure provides method for treating a patient with an USH2A gene containing a guanine deletion at nucleotide position c.2299, the method comprising: administering a first gRNA or sgRNA and second gRNA or sgRNA to the patient, wherein the first gRNA or sgRNA comprises SEQ ID NO: 5299 and the second gRNA or sgRNA comprises SEQ ID NO: 5296.

[0628] In another method, Method 178, the present disclosure provides a method for treating a patient with an USH2A gene containing a guanine deletion at nucleotide position c.2299 as provided in Method 177, wherein the first gRNA or sgRNA and second gRNA or sgRNA are administered simultaneously; the first gRNA or sgRNA is administered prior to the second gRNA or sgRNA; or the second gRNA or sgRNA is administered prior to the first gRNA or sgRNA.

[0629] In another method, Method 179, the present disclosure provides a method for editing an USH2A gene containing a guanine deletion at nucleotide position c.2299, the method comprising: deleting a sequence comprising the guanine deletion at nucleotide position c.2299 of the USH2A gene in a cell using a first gRNA or sgRNA comprising SEQ ID NO: 5299 and a second gRNA or sgRNA comprising SEQ ID NO: 5302.

[0630] In another method, Method 180, the present disclosure provides a method for editing an USH2A gene containing a guanine deletion at nucleotide position c.2299 as provided in Method 179, wherein the deleting results in a deletion of 673 bp.

[0631] In another method, Method 181, the present disclosure provides a method for treating a patient with an USH2A gene containing a guanine deletion at nucleotide position c.2299, the method comprising: administering a first gRNA or sgRNA and second gRNA or sgRNA to the patient, wherein the first gRNA or sgRNA comprises SEQ ID NO: 5299 and the second gRNA or sgRNA comprises SEQ ID NO: 5302.

[0632] In another method, Method 182, the present disclosure provides a method for treating a patient with an USH2A gene containing a guanine deletion at nucleotide position c.2299 as provided in Method 181, wherein the first gRNA or sgRNA and second gRNA or sgRNA are administered simultaneously; the first gRNA or sgRNA is administered prior to the second gRNA or sgRNA; or the second gRNA or sgRNA is administered prior to the first gRNA or sgRNA.

[0633] In another method, Method 183, the present disclosure provides a method for editing an USH2A gene containing a guanine deletion at nucleotide position c.2299, the method comprising: deleting a sequence comprising the guanine deletion at nucleotide position c.2299 of the USH2A gene in a cell using a first gRNA or sgRNA comprising SEQ ID NO: 5299 and a second gRNA or sgRNA comprising SEQ ID NO: 5310.

[0634] In another method, Method 184, the present disclosure provides a method for editing an USH2A gene containing a guanine deletion at nucleotide position c.2299 as provided in Method 183, wherein the deleting results in a deletion of 728 bp.

[0635] In another method, Method 185, the present disclosure provides a method for treating a patient with an USH2A gene containing a guanine deletion at nucleotide position c.2299, the method comprising: administering a first gRNA or sgRNA and second gRNA or sgRNA to the patient, wherein the first gRNA or sgRNA comprises SEQ ID NO: 5299 and the second gRNA or sgRNA comprises SEQ ID NO: 5310.

[0636] In another method, Method 186, the present disclosure provides a method for treating a patient with an USH2A gene containing a guanine deletion at nucleotide position c.2299 as provided in Method 185, wherein the first gRNA or sgRNA and second gRNA or sgRNA are administered simultaneously; the first gRNA or sgRNA is administered prior to the second gRNA or sgRNA; or the second gRNA or sgRNA is administered prior to the first gRNA or sgRNA.

[0637] In a first composition, Composition 1, the present disclosure provides one or more gRNAs for editing an USH2A gene containing a guanine deletion at nucleotide position c.2299 in a cell from a patient with one or more of Usher Syndrome Type 2A and ARRP, the one or more gRNAs comprising a spacer sequence selected from the group consisting of nucleic acid sequences in SEQ ID NOs: 5272-5314 of the Sequence Listing.

[0638] In another composition, Composition 2, the present disclosure provides one or more gRNAs of Composition 1, wherein the guanine deletion at nucleotide position c.2299 is located in exon 13 of the USH2A gene.

[0639] In another composition, Composition 3, the present disclosure provides one or more gRNAs of any one of Compositions 1 or 2, wherein the one or more gRNAs are one or more single-molecule guide RNAs (sgRNAs).

[0640] In another composition, Composition 4, the present disclosure provides one or more gRNAs of any one of Compositions 1-3, wherein the one or more gRNAs or one or more sgRNAs is one or more modified gRNAs or one or more modified sgRNAs.

[0641] In another composition, Composition 5, the present disclosure provides one or more gRNAs of any one of Compositions 1-4, wherein the cell is a photoreceptor cell, retinal progenitor cell, mesenchymal stem cell (MSC), or induced pluripotent stem cell (iPSC).

[0642] In a first therapeutic, Therapeutic 1, the present disclosure provides a therapeutic for treating a patient with one or more of Usher Syndrome Type 2A and ARRP, the therapeutic comprising at least one or more gRNAs for editing an USH2A gene containing a guanine deletion at nucleotide position c.2299, the one or more gRNAs comprising a spacer sequence selected from the group consisting of nucleic acid sequences in SEQ ID NOs: 5272-5314 of the Sequence Listing.

[0643] In another therapeutic, Therapeutic 2, the present disclosure provides the therapeutic of Therapeutic 1, wherein the guanine deletion at nucleotide position c.2299 is located in exon 13 of the USH2A gene.

[0644] In another therapeutic, Therapeutic 3, the present disclosure provides the therapeutic of any one of Therapeutics 1 or 2, wherein the one or more gRNAs are one or more sgRNAs.

[0645] In another therapeutic, Therapeutic 4, the present disclosure provides the therapeutic of any one of Therapeutics 1-3, wherein the one or more gRNAs or one or more sgRNAs is one or more modified gRNAs or one or more modified sgRNAs.

[0646] In another therapeutic, Therapeutic 5, the present disclosure provides a therapeutic for treating a patient with one or more of Usher Syndrome Type 2A and ARRP, the therapeutic formed by a method comprising: introducing one or more DNA endonucleases; introducing one or more gRNA or one or more sgRNA for editing an USH2A gene containing a guanine deletion at nucleotide position c.2299; optionally introducing one or more donor template; wherein the one or more gRNAs or sgRNAs comprise a spacer sequence selected from the group consisting of nucleic acid sequences in SEQ ID NOs: 5272-5314 of the Sequence Listing.

[0647] In another therapeutic, Therapeutic 6, the present disclosure provides the therapeutic of Therapeutic 5, wherein the guanine deletion at nucleotide position c.2299 is located in exon 13 of the USH2A gene.

[0648] In a first kit, Kit 1, the present disclosure provides a kit for treating a patient with one or more of Usher Syndrome Type 2A and ARRP in vivo, the kit comprising: one or more gRNAs or sgRNAs for editing an USH2A gene containing a guanine deletion at nucleotide position c.2299 wherein the one or more gRNAs or sgRNAs comprise a spacer sequence selected from the group consisting of nucleic acid sequences in SEQ ID NOs: 5272-5314 of the Sequence Listing; one or more DNA endonucleases; and optionally, one or more donor template.

[0649] In another kit, Kit 2, the present disclosure provides the kit of Kit 1, wherein the guanine deletion at nucleotide position c.2299 is located in exon 13 of the USH2A gene.

[0650] In another kit, Kit 3, the present disclosure provides any one of Kits 1 or 2, wherein the one or more DNA endonucleases is a Cas1, Cas1B, Cas2, Cas3, Cas4, Cas5, Cas6, Cas7, Cas8, Cas9 (also known as Csn1 and Csx12), Cas100, Csy1, Csy2, Csy3, Cse1, Cse2, Csc1, Csc2, Csa5, Csn2, Csm2, Csm3, Csm4, Csm5, Csm6, Cmr1, Cmr3, Cmr4, Cmr5, Cmr6, Csb1, Csb2, Csb3, Csx17, Csx14, Csx10, Csx16, CsaX, Csx3, Csx1, Csx15, Csf1, Csf2, Csf3, Csf4, or Cpf1 endonuclease; a homolog thereof, a recombination of the naturally occurring molecule thereof, codon-optimized thereof, or modified versions thereof, and combinations thereof.

[0651] In another kit, Kit 4, the present disclosure provides any one of Kits 1-3, comprising one or more donor template.

[0652] In another kit, Kit 5, the present disclosure provides the kit of Kit 4, wherein the donor template comprises homologous arms to the exon 13.

[0653] In a first nucleic acid, Nucleic Acid 1, the present disclosure provides a nucleic acid encoding a gRNA comprising a spacer sequence selected from the group consisting of SEQ ID NOs: 5272-5314.

[0654] In another nucleic acid, Nucleic Acid 2, the present disclosure provides the nucleic acid of Nucleic Acid 1, wherein the gRNA is a sgRNA.

[0655] In a first vector, Vector 1, the present disclosure provides a vector encoding a gRNA comprising a spacer sequence selected from the group consisting of SEQ ID NOs: 5272-5314.

[0656] In another vector, Vector 2, the present disclosure provides the vector of Vector 1, wherein the gRNA is a sgRNA.

[0657] In another vector, Vector 3, the present disclosure provides the vector of any one of Vectors 1 or 2, wherein the vector is an AAV.

[0658] In another vector, Vector 4, the present disclosure provides the vector of any one of Vectors 1-3, wherein the vector is an AAV5 serotype capsid vector.

### Definitions

[0659] In addition to the definitions previously set forth herein, the following definitions are relevant to the present disclosure:

[0660] As used herein, the term “gene” refers to a segment of nucleic acid which encodes and is capable of expressing a specific gene product. A gene often produces a protein or polypeptide as its gene product, but a gene can produce any desired polypeptide or nucleic acid product.

[0661] The term “alteration” or “alteration of genetic information” refers to any change in the genome of a cell.

[0662] The term “insertion” refers to an addition of one or more nucleotides in a DNA sequence. Insertions can range from small insertions of a few nucleotides to insertions of large segments such as a cDNA or a gene.

[0663] The term “deletion” refers to a loss or removal of one or more nucleotides in a DNA sequence or a loss or removal of the function of a gene. In some cases, a deletion can include, for example, a loss of a few nucleotides, an exon, an intron, a gene segment, or the entire sequence of a gene. In some cases, deletion of a gene refers to the elimination or reduction of the function or expression of a gene or its gene product. This can result from not only a deletion of sequences within or near the gene, but also other events (e.g., insertion, nonsense mutation) that disrupt the expression of the gene.

[0664] The term “correction” as used herein, refers to a change of one or more nucleotides of a genome in a cell. Non-limiting examples of a change include an insertion, deletion, substitution, integration, inversion, or duplication. Such correction may result in a more favorable genotypic or phenotypic outcome, whether in structure or function, for the genomic site which is corrected. One non-limiting example of a “correction” includes the change of a mutant or defective sequence which restores structure or function to a gene or its gene product(s). Depending on the nature of the mutation, correction may be achieved via various strategies disclosed herein.

[0665] By “hybridizable” or “complementary” or “substantially complementary” it is meant that a nucleic acid (e.g., RNA) comprises a sequence of nucleotides that enables it to non-covalently bind, e.g.: form Watson-Crick base pairs, “anneal”, or “hybridize,” to another nucleic acid in a sequence-specific, antiparallel manner (i.e., a nucleic acid specifically binds to a complementary nucleic acid) under the appropriate in vitro and/or in vivo conditions of temperature and solution ionic strength. As is known in the art, standard Watson-Crick base-pairing includes: adenine (A) pairing with thymidine (T), adenine (A) pairing with uracil (U), and guanine (G) pairing with cytosine (C) [DNA, RNA]. In some examples, a spacer sequence of a gRNA or sgRNA can be fully complementary to a nucleotide sequence. In other examples, a spacer sequence of a gRNA or sgRNA may be fully complementary to a nucleotide sequence except for in at least one location. In other examples, a spacer sequence of a gRNA or sgRNA may be fully complementary to the nucleotide sequence except for in at least two locations.

[0666] The term “knock-in” refers to an addition of a DNA sequence, or fragment thereof into a genome. Such DNA sequences to be knocked-in may include an entire gene or genes, may include regulatory sequences associated with a gene or any portion or fragment of the foregoing. For example, a cDNA encoding the wild-type protein may be inserted into the genome of a cell carrying a mutant gene. Knock-in strategies need not replace the defective gene, in whole or in part. In some cases, a knock-in strategy may further involve substitution of an existing sequence with the provided sequence, e.g., substitution of a mutant allele with a wild-type copy. On the other hand, the term “knock-out” refers to the elimination of a gene or the expression of a gene. For example, a gene can be knocked out by either a deletion or an addition of a nucleotide sequence that leads to a disruption of the reading frame. As another example, a gene may be knocked out by replacing a part of the gene with an irrelevant sequence. Finally, the term “knock-down” as used herein refers to reduction in the expression of a gene or its gene product(s). As a result of a gene knock-down, the protein activity or function may be attenuated or the protein levels may be reduced or eliminated.

[0667] The term “comprising” or “comprises” is used in reference to compositions, therapeutics, kits, methods, and respective component(s) thereof, that are essential to the present disclosure, yet open to the inclusion of unspecified elements, whether essential or not.

[0668] The term “consisting essentially of” refers to those elements required for a given aspect. The term permits the presence of additional elements that do not materially affect the basic and novel or functional characteristic(s) of that aspect of the present disclosure.

[0669] The term “consisting of” refers to compositions, therapeutics, kits, methods, and respective components thereof as described herein, which are exclusive of any element not recited in that description of the aspect.

[0670] The singular forms “a,” “an,” and “the” include plural references, unless the context clearly dictates otherwise.

[0671] Any numerical range recited in this specification describes all sub-ranges of the same numerical precision (i.e., having the same number of specified digits) subsumed within the recited range. For example, a recited range of “1.0 to 10.0” describes all sub-ranges between (and including) the recited minimum value of 1.0 and the recited maximum value of 10.0, such as, for example, “2.4 to 7.6,” even if the range of “2.4 to 7.6” is not expressly recited in the text of the specification. Accordingly, the Applicant reserves the right to amend this specification, including the claims, to expressly recite any sub-range of the same numerical precision subsumed within the ranges expressly recited in this specification. All such ranges are inherently described in this specification such that amending to expressly recite any such sub-ranges will comply with written description, sufficiency of description, and added matter requirements, including the requirements under 35 U.S.C. § 112(a) and Article 123(2) EPC. Also, unless expressly specified or otherwise required by context, all numerical parameters described in this specification (such as those expressing values, ranges, amounts, percentages, and the like) may be read as if prefaced by the word “about,” even if the word “about” does not expressly appear before a number. Additionally, numerical parameters described in this specification should be construed in light of the number of reported significant digits, numerical precision, and by applying ordinary rounding techniques. It is also understood that numerical parameters described in this specification will necessarily possess the inherent variability characteristic of the underlying measurement techniques used to determine the numerical value of the parameter.

[0672] Any patent, publication, or other disclosure material identified herein is incorporated by reference into this specification in its entirety unless otherwise indicated, but only to the extent that the incorporated material does not conflict with existing descriptions, definitions, statements, or other disclosure material expressly set forth in this specification. As such, and to the extent necessary, the express disclosure as set forth in this specification supersedes any conflicting material incorporated by reference. Any material, or portion thereof, that is said to be incorporated by reference into this specification, but which conflicts with existing definitions, statements, or other disclosure material set forth herein, is only incorporated to the extent that no conflict arises between that incorporated material and the existing disclosure material. Applicants reserve the right to amend this specification to expressly recite any subject matter, or portion thereof, incorporated by reference herein.

[0673] The details of one or more aspects of the present disclosure are set forth in the accompanying examples below. Although any materials and methods similar or equivalent to those described herein can be used in the practice or testing of the present disclosure, specific examples of the materials and methods contemplated are now described. Other features, objects and advantages of the present disclosure will be apparent from the description. In the description examples, the singular forms also include the plural unless the context clearly dictates otherwise. Unless defined otherwise, all technical and scientific terms used herein have the same meaning as commonly understood by one of ordinary skill in the art to which this present disclosure belongs. In the case of conflict, the present description will control.

### EXAMPLES

[0674] The present disclosure will be more fully understood by reference to the following examples, which provide illustrative, non-limiting aspects of the invention.

[0675] The examples describe the use of the CRISPR system as an illustrative genome editing technique to create defined therapeutic genomic deletions, insertions, or replacements within the USH2A gene that lead to an excision of the c.2299delG or a correction of the c.2299delG in the genomic locus that restores usherin protein function. Introduction of the defined therapeutic modifications represents a novel therapeutic strategy for the potential amelioration, if not elimination, of one or more of Usher Syndrome Type 2A and ARRP, as described and illustrated herein.

### Example 1—CRISPR/S. pyogenes(Sp)Cas9 PAM Sites in Regions Upstream and Downstream of the c.2299delG in the USH2A Gene

[0676] To discover target sites for genome editing by SpCas9, a 5000 bp segment including regions upstream of the c.2299delG and regions downstream of the c.2299delG was scanned for SpCas9 protospacer adjacent motifs (PAMs). The 5000 bp segment included about 2000 bp of the intron 12-13 region of the USH2A gene, exon 13 of the USH2A gene (642 bp), and about 2000 bp of the intron 13-14 region of the USH2A gene. The area was scanned for PAMs having the sequence NRG. gRNA spacer sequences (17-24 bps.) located immediately upstream of the NRG PAM were then identified. These sequences are candidates for use in editing the gene.

### Example 2—CRISPR/S. aureus(Sa)Cas9 PAM Sites in Regions Upstream and Downstream of the c.2299delG in the USH2A Gene

[0677] To discover target sites for genome editing by SaCas9, a 5000 bp segment including regions upstream of the c.2299delG and regions downstream of the c.2299delG is scanned for SaCas9 PAMs. The 5000 bp segment included about 2000 bp of the intron 12-13 region of the USH2A gene, exon 13 of the USH2A gene (642 bp), and about 2000 bp of the intron 13-14 region of the USH2A gene. The area is scanned for PAMs having the sequence NNGRRT. gRNA spacer sequences (17-24 bps) located immediately upstream of the NNGRRT PAM are then identified. These sequences are candidates for use in editing the gene.

### Example 3—CRISPR/S. thermophilus(St)Cas9 PAM Sites in Regions Upstream and Downstream of the c.2299delG in the USH2A Gene

[0678] To discover target sites for genome editing by StCas9, a 5000 bp segment including regions upstream of the c.2299delG and regions downstream of the c.2299delG is scanned for StCas9 PAMs. The 5000 bp segment included about 2000 bp of the intron 12-13 region of the USH2A gene, exon 13 of the USH2A gene (642 bp), and about 2000 bp of the intron 13-14 region of the USH2A gene. The area is scanned for PAMs having the sequence NNAGAAW. gRNA spacer sequences (17-24 bps) located immediately upstream of the NNAGAAW PAM are then identified. These sequences are candidates for use in editing the gene.

### Example 4—CRISPR/T. denticola(Td)Cas9 PAM Sites in Regions Upstream and Downstream of the c.2299delG in the USH2A Gene

[0679] To discover target sites for genome editing by TdCas9, a 5000 bp segment including regions upstream of the c.2299delG and regions downstream of the c.2299delG is scanned for TdCas9 PAMs. The 5000 bp segment included about 2000 bp of the intron 12-13 region of the USH2A gene, exon 13 of the USH2A gene (642 bp), and about 2000 bp of the intron 13-14 region of the USH2A gene. The area is scanned for PAMs having the sequence NAAAAC. gRNA spacer sequences (17-24 bps) located immediately upstream of the NAAAAC PAM are then identified. These sequences are candidates for use in editing the gene.

### Example 5—CRISPR/N. meningitides(Nm)Cas9 PAM Sites in Regions Upstream and Downstream of the c.2299delG in the USH2A Gene

[0680] To discover target sites for genome editing by NmCas9, a 5000 bp segment including regions upstream of the c.2299delG and regions downstream of the c.2299delG is scanned for NmCas9 PAMs. The 5000 bp segment included about 2000 bp of the intron 12-13 region of the USH2A gene, exon 13 of the USH2A gene (642 bp), and about 2000 bp of the intron 13-14 region of the USH2A gene. The area is scanned for PAMs having the sequence NNNNGHTT. gRNA spacer sequences (17-24 bps) located immediatly upstream of the NNNNGHTT PAM are then identified. These sequences are candidates for use in editing the gene

### Example 6—CRISPR/Cpf1 PAM Sites in Regions Upstream and Downstream of the c.2299delG in the USH2A Gene

[0681] To discover target sites for genome editing by Cpf1, a 5000 bp segment including regions upstream of the c.2299delG and regions downstream of the c.2299delG is scanned for Cpf1 PAMs. The 5000 bp segment included about 2000 bp of the intron 12-13 region of the USH2A gene, exon 13 of the USH2A gene (642 bp), and about 2000 bp of the intron 13-14 region of the USH2A gene. The area is scanned for PAMs having the sequence YTN. gRNA spacer sequences (17-24 bps) located immediately upstream of the YTN PAM were then identified. These sequences are candidates for use in editing the gene

### Example 7—Bioinformatics Analysis of the Guide RNAs

[0682] A gRNA or sgRNA can direct an RNP complex to an on-target site such as a genomic sequence for which editing is desired but may also have the potential to interact with an off-target site for which editing is not desired. To identify which candidate gRNAs that were likely to have on-target and/or off-target activity, candidate gRNAs were screened and selected in a single process or multi-step process that used both in silico analysis of binding and experimentally assessed activity at both on-target and off-target sites

[0683] By way of illustration, candidate gRNAs having sequences that match a particular on-target site, such as a site upstream or downstream of the c.2299delG in the USH2A gene, with an adjacent PAM were assessed for their potential to cleave at off-target sites having similar sequences, using one or more of a variety of bioinformatics tools available for assessing off-target binding, as described and illustrated in more detail below, in order to assess the likelihood of effects at chromosomal positions other than those intended.

[0684] Candidates predicted to have relatively lower potential for off-target activity were then assessed experimentally to measure their on-target activity, and then off-target activities at various sites. gRNAs having sufficiently high on-target activity to achieve desired levels of gene editing at the selected locus, and relatively lower off-target activity to reduce the likelihood of alterations at other chromosomal loci were preferred. The ratio of on-target to off-target activity is often referred to as the “specificity” of a gRNA.

[0685] For initial screening of predicted off-target activities, there were a number of bioinformatics tools known and publicly available that were used to predict the most likely off-target sites; and since binding to target sites in the CRISPR/Cas9/Cpf1 nuclease system is driven by Watson-Crick base pairing between complementary sequences, the degree of dissimilarity (and therefore reduced potential for off-target binding) was essentially related to primary sequence differences: mismatches and bulges, i.e. bases that were changed to a non-complementary base, and insertions or deletions of bases in the potential off-target site relative to the target site. An exemplary bioinformatics tool called COSMID (CRISPR Off-target Sites with Mismatches, Insertions and Deletions) (available on the web at crispr.bme.gatech.edu) compiles such similarities. Other bioinformatics tools include, but are not limited to autoCOSMID and CCTop.

[0686] Bioinformatic tools were used to minimize off-target cleavage in order to reduce the detrimental effects of mutations and chromosomal rearrangements. Studies on CRISPR/Cas9 systems suggested the possibility of off-target activity due to non-specific hybridization of the guide strand to DNA sequences with base pair mismatches and/or bulges, particularly at positions distal from the PAM region. Therefore, it was important to have a bioinformatics tool that identified potential off-target sites that have insertions and/or deletions between the RNA guide strand and genomic sequences, in addition to base-pair mismatches. Bioinformatics tools based upon the off-target prediction algorithm CCTop were used to search genomes for potential CRISPR off-target sites (CCTop is available on the web at crispr.cos.uni-heidelberg.de/). The output ranked lists of the potential off-target sites based on the number and location of mismatches, allowing more informed choice of target sites, and avoiding the use of sites with more likely off-target cleavage.

[0687] Additional bioinformatics pipelines were employed that weigh the estimated on- and/or off-target activity of gRNA targeting sites in a region. Other features that were used to predict activity include information about the cell type in question, DNA accessibility, chromatin state, transcription factor binding sites, transcription factor binding data, and other CHIP-seq data. Additional factors were weighed that predict editing efficiency, such as relative positions and directions of pairs of gRNAs, local sequence features and micro-homologies.

[0688] The processes allowed for selection of high specificity gRNAs or sgRNAs.

### Example 8—Testing sgRNA On-Target Activity in SpCas9-Expressing HEK 293 FT Cells

[0689] To further evaluate gRNAs provided herein, selected sgRNAs were tested for on-target editing efficiency. sgRNAs that hybridize either upstream or downstream of the c.2299delG mutation were tested in wild-type HEK 293 FT cells, using SpCas9. Because the sgRNAs bind to DNA sequences near, but not overlapping with, the c.2299delG mutation, Applicants performed these experiments in wild-type HEK 293 FT cells.

[0690] The HEK 293 FT cells comprise a SpCas9 open reading frame (ORF) operably linked to a constitutive promoter integrated into the AAVS1 locus. The cells were cultured in 10% heat-inactivated (HI) FBS/90% DMEM supplemented with 1 μg/ml puromycin and passaged every 3-4 days.

[0691] The HEK 293 FT cells were seeded in 100 μl of 10% HI FBS/90% DMEM at 50,000 cells per well in a 96-well plate, and transfected with 1 μg of sgRNA using Lipofectamine® Messenger-Max™ (available from Thermo Fisher Scientific, Massachusetts, US).

[0692] sgRNAs used for this assay were synthesized by in vitro transcription (IVT). The sgRNAs target locations downstream or upstream of the c.2299delG mutation. Specifically, individual sgRNAs can target sequences within intron 12-13, within exon 13, or within intron 13-14. Thus, combinations of these sgRNAs (e.g., dual sgRNAs, see Example 9) are suitable to cause deletions consistent with those shown in FIGS. 3 B-D.

[0693] At 48 hours post-transfection, culture medium was removed and total DNA was extracted using prepGem® Tissue Kit (available from VWR, Pennsylvania, US). The sequence surrounding the loci targeted by the sgRNAs was PCR amplified. The resulting products were cleaned up using AMPure XP beads (Available form Beckman Coulter, California, US), and sequenced to assess Cas9-mediated genetic modifications. The frequencies of small insertions and deletions (indels) were estimated using TIDE.

[0694] Sequence analysis revealed that the sgRNAs that target locations upstream and downstream of the c.2299delG mutation had an on-target editing efficiency range of 50.9% to 87.7% (FIG. 4).

[0695] These data provide evidence that sgRNAs provided herein can display on-target activity for the sequence surrounding the c.2299delG mutation. Sequences displaying such on-target activity are useful for gene editing, for example, for use in therapeutic methods described in FIGS. 3 B-D and throughout the specification.

### Example 9—Testing of Dual sgRNAs for On-Target Activity in HEK 293 FT Cells

[0696] To further evaluate gRNAs provided herein, selected sgRNAs were tested for on-target editing efficiency. sgRNAs that hybridize either upstream or downstream of the c.2299delG mutation were tested in wild-type HEK 293 FT cells, using SpCas9. Because the sgRNAs bind to DNA sequences near, but not overlapping with, the c.2299delG mutation, Applicants performed these experiments in wild-type HEK 293 FT cells. The selected sgRNAs were tested in pairs for their ability to cause a deletion of the intervening sequence between their respective target sites. As used herein, “dual sgRNAs” can refer to this approach to creating a genomic deletion.

[0697] The HEK 293 FT cells comprise a SpCas9 open reading frame (ORF) operably linked to a constitutive promoter integrated into the AAVS1 locus. The cells were cultured in 10% HI FBS/90% DMEM supplemented with 1 μg/ml puromycin and passaged every 3-4 days.

[0698] The HEK 293 FT cells were seeded in 100 μl of 10% HI FBS/90% DMEM at 50,000 cells per well in a 96-well plate. Transfection was performed with 0.5 μg of a first sgRNA that targets a sequence in intron 12-13 and 0.5 μg of a second sgRNA that targets a sequence either in exon 13 or in intron 13-14 of the USH2A gene. FIG. 5 shows the locations of sequences targeted by the sgRNAs used in this Example. FIG. 6A shows a table listing the pairs of sgRNAs used in this Example and describing the deletion expected to result after transfection. Transfection was performed using Lipofectamine® Messenger-Max™.

[0699] The sgRNAs used in this study were synthesized by Thermo Fisher Scientific. The sgRNAs comprise a specific spacer sequence (sgRNA comprising any of the spacer sequences listed in FIG. 5) and the vendor's proprietary tracrRNA sequence.

[0700] The transfected HEK 293 FT cells expressing SpCas9 were compared to control cells, which were either un-transfected HEK 293 FT cells expressing SpCas9 or HEK 293 FT cells expressing SpCas9 that were transfected with a mRNA encoding for mCherry (data not shown).

[0701] TIDE analysis cannot be used to measure editing efficiency when dual sgRNAs are used since a large region of genomic DNA is excised and the TIDE software cannot quantify these larger deletions. TIDE analysis is better suited to analyze small sized deletions and insertions such as those expected to be generated via NHEJ resulting from a DSB generated by a single sgRNA. In addition, shorter length PCR products would be favored in a PCR reaction to estimate the editing level of dual sgRNAs, thus overestimating the percentage of edited cells. Instead, quantitative analysis of deletions generated from edits by the first sgRNA and second sgRNA can be best performed using droplet digital (dd)PCR.

[0702] Genomic DNA was harvested from transfected wild-type HEK 293 FT cells 48 hours after transfection using a DNeasy® Blood and Tissue Kit (available from Qiagen, Netherlands). Genomic DNA was digested with an XHOI restriction enzyme, and 50 ng was used for ddPCR. During ddPCR, two PCR products (a “target” PCR product and “reference” PCR product) could be amplified (FIG. 6B). To reduce the viscosity before ddPCR, the genomic DNA is digested with XHOI, which does not cut in the immediate vicinity of the two PCR products or the regions between them.

[0703] ddPCR was performed by using 2 primer and probe sets. A first primer and probe set comprises a forward primer: TCCATGGCTCAGTGAACAAA (SEQ ID NO: 5401), a reverse primer: CTTCAACATTGGGCTTGCAG (SEQ ID NO: 5402), and a probe: ACACAGCTGGATCCCTCCCTGGGACT (SEQ ID NO: 5403). The probe is labeled with 5′6 FAM-3BHQ. The primers amplify a piece of DNA on Exon 13 of USH2A (a target PCR product).

[0704] A second primer and probe set comprises a forward primer: TCCAGATGGTAGCTGAGGTT (SEQ ID NO: 5404), a reverse primer: GTCCCAGAGGGAAACTTGAC (SEQ ID NO: 5405), and a probe: GCTGACCACCAGCCAAAGGGGCAC (SEQ ID NO: 5406). The probe is labeled with 5′HEX-3BHQ. The primers amplify a piece of DNA on Exon 17 of USH2A (a reference PCR product) (FIG. 6B).

[0705] In unedited cells, no genomic DNA is deleted, and the primers and probe sets amplify and label both the reference and the target PCR products. In edited cells, where at least a portion of USH2A exon 13 has been excised (e.g., deleted), the primer and probe set for the target cannot bind, cannot amplify, and cannot label the target PCR product. However, the DNA on USH2A exon 17 is unaffected and the reference PCR product can be still amplified and labeled. Therefore, the ratio of target PCR product to reference PCR product in unedited cells is close to 1. In edited cells, the ratio of target PCR product to reference PCR product decreases. Exon 13 Deletion Efficiency (%) was calculated as (1−the ratio of target product to reference product)*100.

[0706] 17 gRNAs were selected to be tested as dual sgRNAs for their ability to induce whole or partial exon 13 deletion. The first sgRNA targets within intron 12-13, and the second sgRNA targets within exon 13 or within intron 13-14 of the USH2A gene (FIG. 5). The size of the deletion products generated from edits between the first sgRNA and the second sgRNA was calculated from theoretically predicted DNA break sites located three nucleotides upstream of the PAM sequence for each of the first sgRNAs and the second sgRNAs (FIG. 6A). The size of the deletion products ranged from 248 to 847 bp.

[0707] The deletion efficiency of dual gRNAs was determined to be in the range of 22% to 68.4% (FIG. 6C).

[0708] When HEK 293 FT cells were transfected with a first sgRNA, USH2AEx13Mut_T2 (a sgRNA comprising SEQ ID NO: 5295), and a second sgRNA, USH2AEx13Mut_T81 (a sgRNA comprising SEQ ID NO: 5313), a whole exon 13 deletion was achieved in 22.01±7.5% of genomic DNA.

[0709] When HEK 293 FT cells were transfected with a first sgRNA, USH2AEx13Mut_T2 (a sgRNA comprising SEQ ID NO: 5295), and a second sgRNA, USH2AEx13Mut_T84 (a sgRNA comprising SEQ ID NO: 5314), a whole exon 13 deletion was achieved in 24.23±5.21% of genomic DNA.

[0710] When HEK 293 FT cells were transfected with a first sgRNA, USH2AEx13Mut_T24 (a sgRNA comprising SEQ ID NO: 5299), and a second sgRNA, USH2AEx13Mut_T81 (a sgRNA comprising SEQ ID NO: 5313), a whole exon 13 deletion was achieved in 30.12±8.25% of genomic DNA.

[0711] When HEK 293 FT cells were transfected with a first sgRNA, USH2AEx13Mut_T24 (a sgRNA comprising SEQ ID NO: 5299), and a second sgRNA, USH2AEx13Mut_T84 (a sgRNA comprising SEQ ID NO: 5314), a whole exon 13 deletion was achieved in 26.94±7.78% of genomic DNA.

[0712] When HEK 293 FT cells were transfected with a first sgRNA, USH2AEx13Mut_T2 (a sgRNA comprising SEQ ID NO: 5295), and a second sgRNA, USH2AEx13Mut_T57 (a sgRNA comprising SEQ ID NO: 5276), a partial exon 13 deletion was achieved in 37.07±24.27% of genomic DNA.

[0713] When HEK 293 FT cells were transfected with a first sgRNA, USH2AEx13Mut_T2 (a sgRNA comprising SEQ ID NO: 5295), and a second sgRNA, USH2AEx13Mut_T37 (a sgRNA comprising SEQ ID NO: 5275), a partial exon 13 deletion was achieved in 62.34±7.43% of genomic DNA.

[0714] When HEK 293 FT cells were transfected with a first sgRNA, USH2AEx13Mut_T2 (a sgRNA comprising SEQ ID NO: 5295), and a second sgRNA, USH2AEx13Mut_T35 (a sgRNA comprising SEQ ID NO: 5277), a partial exon 13 deletion was achieved in 66.91±2.16% of genomic DNA.

[0715] When HEK 293 FT cells were transfected with a first sgRNA, USH2AEx13Mut_T2 (a sgRNA comprising SEQ ID NO: 5295), and a second sgRNA, USH2AEx13Mut_T13 (a sgRNA comprising SEQ ID NO: 5278), a partial exon 13 deletion was achieved in 32.77±14.02% of genomic DNA.

[0716] When HEK 293 FT cells were transfected with a first sgRNA, USH2AEx13Mut_T2 (a sgRNA comprising SEQ ID NO: 5295), and a second sgRNA, USH2AEx13Mut_T43 (a sgRNA comprising SEQ ID NO: 5287), a partial exon 13 deletion was achieved in 68.43±0.23% of genomic DNA.

[0717] When HEK 293 FT cells were transfected with a first sgRNA, USH2AEx13Mut_T2 (a sgRNA comprising SEQ ID NO: 5295), and a second sgRNA, USH2AEx13Mut_T17 (a sgRNA comprising SEQ ID NO: 5286), a partial exon 13 deletion was achieved in 36.85±17.32% of genomic DNA.

[0718] When HEK 293 FT cells were transfected with a first sgRNA, USH2AEx13Mut_T2 (a sgRNA comprising SEQ ID NO: 5295), and a second sgRNA, USH2AEx13Mut_T60 (a sgRNA comprising SEQ ID NO: 5290), a partial exon 13 deletion was achieved in 28.09±8.88% of genomic DNA.

[0719] When HEK 293 FT cells were transfected with a first sgRNA, USH2AEx13Mut_T2 (a sgRNA comprising SEQ ID NO: 5295), and a second sgRNA, USH2AEx13Mut_T14 (a sgRNA comprising SEQ ID NO: 5291), a partial exon 13 deletion was achieved in 35.82±7.82% of genomic DNA.

[0720] When HEK 293 FT cells were transfected with a first sgRNA, USH2AEx13Mut_T2 (a sgRNA comprising SEQ ID NO: 5295), and a second sgRNA, USH2AEx13Mut_T38 (a sgRNA comprising SEQ ID NO: 5292), a partial exon 13 deletion was achieved in 18.12±6.81% of genomic DNA.

[0721] When HEK 293 FT cells were transfected with a first sgRNA, USH2AEx13Mut_T2 (a sgRNA comprising SEQ ID NO: 5295), and a second sgRNA, USH2AEx13Mut_T69 (a sgRNA comprising SEQ ID NO: 5294), a partial exon 13 deletion was achieved in 27.02±15.67% of genomic DNA.

[0722] When HEK 293 FT cells were transfected with a first sgRNA, USH2AEx13Mut_T2 (a sgRNA comprising SEQ ID NO: 5295), and a second sgRNA, USH2AEx13Mut_T19 (a sgRNA comprising SEQ ID NO: 5296), a partial exon 13 deletion was achieved in 35.24±7.62% of genomic DNA.

[0723] When HEK 293 FT cells were transfected with a first sgRNA, USH2AEx13Mut_T2 (a sgRNA comprising SEQ ID NO: 5295), and a second sgRNA, USH2AEx13Mut_T51 (a sgRNA comprising SEQ ID NO: 5302), a partial exon 13 deletion was achieved in 25.14±9.46% of genomic DNA.

[0724] When HEK 293 FT cells were transfected with a first sgRNA, USH2AEx13Mut_T2 (a sgRNA comprising SEQ ID NO: 5295), and a second sgRNA, USH2AEx13Mut_T3 (a sgRNA comprising SEQ ID NO: 5310), a partial exon 13 deletion was achieved in 27.88±4.58% of genomic DNA.

[0725] When HEK 293 FT cells were transfected with a first sgRNA, USH2AEx13Mut_T24 (a sgRNA comprising SEQ ID NO: 5299), and a second sgRNA, USH2AEx13Mut_T57 (a sgRNA comprising SEQ ID NO: 5276), a partial exon 13 deletion was achieved in 43.10±24.61% of genomic DNA.

[0726] When HEK 293 FT cells were transfected with a first sgRNA, USH2AEx13Mut_T24 (a sgRNA comprising SEQ ID NO: 5299), and a second sgRNA, USH2AEx13Mut_T37 (a sgRNA comprising SEQ ID NO: 5275), a partial exon 13 deletion was achieved in 60.65±7.48% of genomic DNA.

[0727] When HEK 293 FT cells were transfected with a first sgRNA, USH2AEx13Mut_T24 (a sgRNA comprising SEQ ID NO: 5299), and a second sgRNA, USH2AEx13Mut_T35 (a sgRNA comprising SEQ ID NO: 5277), a partial exon 13 deletion was achieved in 67.85±6.07% of genomic DNA.

[0728] When HEK 293 FT cells were transfected with a first sgRNA, USH2AEx13Mut_T24 (a sgRNA comprising SEQ ID NO: 5299), and a second sgRNA, USH2AEx13Mut_T13 (a sgRNA comprising SEQ ID NO: 5278), a partial exon 13 deletion was achieved in 45.06±8.60% of genomic DNA.

[0729] When HEK 293 FT cells were transfected with a first sgRNA, USH2AEx13Mut_T24 (a sgRNA comprising SEQ ID NO: 5299), and a second sgRNA, USH2AEx13Mut_T43 (a sgRNA comprising SEQ ID NO: 5287), a partial exon 13 deletion was achieved in 61.27±6.17% of genomic DNA.

[0730] When HEK 293 FT cells were transfected with a first sgRNA, USH2AEx13Mut_T24 (a sgRNA comprising SEQ ID NO: 5299), and a second sgRNA, USH2AEx13Mut_T17 (a sgRNA comprising SEQ ID NO: 5286), a partial exon 13 deletion was achieved in 47.53±5.89% of genomic DNA.

[0731] When HEK 293 FT cells were transfected with a first sgRNA, USH2AEx13Mut_T24 (a sgRNA comprising SEQ ID NO: 5299), and a second sgRNA, USH2AEx13Mut_T60 (a sgRNA comprising SEQ ID NO: 5290), a partial exon 13 deletion was achieved in 35.74±5.61% of genomic DNA.

[0732] When HEK 293 FT cells were transfected with a first sgRNA, USH2AEx13Mut_T24 (a sgRNA comprising SEQ ID NO: 5299), and a second sgRNA, USH2AEx13Mut_T14 (a sgRNA comprising SEQ ID NO: 5291), a partial exon 13 deletion was achieved in 35.59±9.33% of genomic DNA.

[0733] When HEK 293 FT cells were transfected with a first sgRNA, USH2AEx13Mut_T24 (a sgRNA comprising SEQ ID NO: 5299), and a second sgRNA, USH2AEx13Mut_T38 (a sgRNA comprising SEQ ID NO: 5292), a partial exon 13 deletion was achieved in 28.01±1.78% of genomic DNA.

[0734] When HEK 293 FT cells were transfected with a first sgRNA, USH2AEx13Mut_T24 (a sgRNA comprising SEQ ID NO: 5299), and a second sgRNA, USH2AEx13Mut_T69 (a sgRNA comprising SEQ ID NO: 5294), a partial exon 13 deletion was achieved in 39.50±1.17% of genomic DNA.

[0735] When HEK 293 FT cells were transfected with a first sgRNA, USH2AEx13Mut_T24 (a sgRNA comprising SEQ ID NO: 5299), and a second sgRNA, USH2AEx13Mut_T19 (a sgRNA comprising SEQ ID NO: 5296), a partial exon 13 deletion was achieved in 41.22±3.51% of genomic DNA.

[0736] When HEK 293 FT cells were transfected with a first sgRNA, USH2AEx13Mut_T24 (a sgRNA comprising SEQ ID NO: 5299), and a second sgRNA, USH2AEx13Mut_T51 (a sgRNA comprising SEQ ID NO: 5302), a partial exon 13 deletion was achieved in 38.88±4.11% of genomic DNA.

[0737] When HEK 293 FT cells were transfected with a first sgRNA, USH2AEx13Mut_T24 (a sgRNA comprising SEQ ID NO: 5299), and a second sgRNA, USH2AEx13Mut_T3 (a sgRNA comprising SEQ ID NO: 5310), a partial exon 13 deletion was achieved in 30.13±1.76% of genomic DNA.

[0738] These data provide evidence that gRNAs provided herein can be used as dual sgRNAs to delete at least a portion of exon 13 of the USH2A gene and therefore are useful in therapeutic methods described in FIGS. 3B and 3C and throughout the specification.

### Example 10—Testing of Dual sgRNAs for On-Target Activity in HEK 293 Cells

[0739] To test a therapeutic approach depicted in FIG. 3D, a first gRNA of the present disclosure for example, a sgRNA comprising either of the spacer sequences reported in SEQ ID NOs: 5313 and 5314 is paired with a second sgRNA of the present disclosure. The second sgRNA comprises a spacer sequence that results in targeting an RNP complex to a sequence within exon 13 of the USH2A gene. A genomic deletion, as described in FIG. 3D is thereby generated. Efficiency of the deletion is calculated as described herein (e.g., as described in Example 9).

[0740] These data can provide support for use of gRNAs provided herein as dual sgRNAs to delete at least a portion of exon 13 of the USH2A gene and therefore are useful in therapeutic methods described in FIG. 3D and throughout the specification.

### Example 11—Testing of Dual sgRNAs

[0741] Selected sgRNAs are tested in HEK 293 cells, which have been engineered to carry the c.2299delG mutation. In some tests, the deletion efficiency of dual sgRNAs provided herein is determined.

[0742] Selected sgRNAs are tested in immortalized fibroblasts derived from patients carrying the c.2299delG mutation. In some tests, the deletion efficiency of dual sgRNAs provided herein is determined.

[0743] Selected sgRNAs are tested in Y79 cells, which are a retinoblastoma cell line that expresses mRNA for USH2A. In some tests, the deletion efficiency of dual sgRNAs provided herein is determined.

### Example 12—Testing of Guide RNAs in Cells for Genomic Off-Target Activity

[0744] It is generally desirable to limit off-target editing. Accordingly, to determine the extent of off-target editing on a genomic level, gRNAs (or sgRNAs) demonstrated to have on-target activity are tested for targeted-genome-wide off-target editing using GUIDE-seq, Amplicon-seq, and/or Digenome-seq. Off-target effects are tested in human cells. Such methods are known in the art and examples are provided herein.

### Example 13—Testing Different Approaches for HDR Gene Editing

[0745] In addition to testing a gRNA for both on-target activity and off-target activity, the HDR strategy is tested.

[0746] For the HDR strategy, donor DNA template is provided as a short single-stranded oligonucleotide, a short double-stranded oligonucleotide (PAM sequence intact/PAM sequence mutated), a long single-stranded DNA molecule (PAM sequence intact/PAM sequence mutated) or a long double-stranded DNA molecule (PAM sequence intact/PAM sequence mutated). In some examples, the donor DNA template is delivered by AAV.

[0747] These results demonstrate the efficacy of the various HDR gene editing strategies and are used to select effective constructs and strategies.

### Example 14—Re-Assessment of Lead CRISPR-Cas9/DNA Donor Combinations

[0748] In some cases, one or more lead CRISPR-Cas9/DNA donor combinations are assessed in cells for efficiency of deletion, recombination, and off-target specificity. In some examples, Cas9 mRNA or RNP are formulated into lipid nanoparticles for delivery, sgRNAs are formulated into nanoparticles or delivered as a recombinant AAV particle, and donor DNA is formulated into nanoparticles or delivered as recombinant AAV particle.

[0749] These data demonstrate the efficacy of a formulation for, e.g., an HDR strategy.

### Example 15—Testing for a Partial or Full Deletion of Exon 13 (Exon Skipping)

[0750] After testing the gRNAs for both on-target activity and off-target activity, combinations of two guide RNAs (e.g., dual sgRNAs) are tested to determine their ability to induce partial deletion or full deletion of exon 13 by gene editing. The first guide RNA targets a 5′ locus upstream of the c.2299delG (within or near the intron 12-13 or the exon 13 of the USH2A gene) and the second guide RNA targets a 3′ locus downstream of the c.2299delG (within or near the exon 13 or the intron 13-14 of the USH2A gene). Efficient gene editing results in transcription of shorter mRNA molecules lacking exon 13 and in translation of a shorter usherin protein. Deletion of partial or the entire exon 13 at DNA level is analyzed by PCR, agarose gel, and next generation sequencing. In addition, mRNA and protein analyses are performed measuring the level of expression and the type of transcripts in human cells expressing USH2A.

### Example 16—In Vivo Testing in Relevant Animal Model

[0751] Selected CRISPR-Cas9/guide combinations identified herein are tested in vivo in an animal model, such as a rhesus macaque (Macaca mulatta) and crab-eating macaque (Macaca fascicularis). In addition, formulations are tested in a human eye from a human donor.

### Note Regarding Illustrative Examples

[0752] While the present disclosure provides descriptions of various specific aspects for the purpose of illustrating various examples of the present disclosure and/or its potential applications, it is understood that variations and modifications will occur to those skilled in the art. Accordingly, the invention or inventions described herein should be understood to be at least as broad as they are claimed, and not as more narrowly defined by particular illustrative examples provided herein.

1-21. (canceled)

22. A method for editing an USH2A gene containing a guanine deletion at nucleotide position c.2299, the method comprising:
editing a human cell by effecting one or more single-strand breaks (SSBs) or double-strand breaks (DSBs) within or near one or more of: intron 12-13, exon 13, and intron 13-14 of the USH2A gene to correct the guanine deletion at nucleotide position c.2299 to create an edited human cell.

23. The method of claim 22, wherein the method comprises introducing into the cell one or more polynucleotides encoding an endonuclease selected from Cas9 and Cpf1 endonucleases and nickases.

24. The method of claim 22, wherein the method comprises introducing into the cell one or more ribonucleic acids (RNAs) encoding endonucleases selected from Cas9 and Cpf1 endonucleases and nickases.

25. The method of claim 22, wherein the method comprises introducing into the cell one or more gRNAs are single-molecule guide RNA (sgRNAs).

26. The method of claim 25, wherein the one or more gRNAs or one or more sgRNAs is one or more modified gRNAs or one or more modified sgRNAs.

27. The method of claim 25, wherein the one or more DNA endonucleases is pre-complexed with one or more gRNAs or one or more sgRNAs.

28. The method of claim 22, wherein usherin protein function is restored in the human cell and the restoration of usherin protein function is a result of exon 13 skipping during mRNA processing.

29. The method of claim 22, further comprising introducing into the cell a polynucleotide donor template comprising at least a portion of the wild-type USH2A gene, or cDNA.

30. The method of claim 29, wherein the at least a portion of the wild-type USH2A gene or cDNA comprises exon 13, intronic regions, or combinations thereof.

31. The method of claim 29, wherein the polynucleotide donor template has homologous arms to exon 13.

32. The method of claim 22, the gRNA comprises a spacer sequence that is complementary to a segment of the locus located within or near one or more of: the intron 12-13, the exon 13, and the intron 13-14 of the USH2A gene.

33. The method of claim 22, wherein the one or more gRNAs comprise first and second gRNAs and the first gRNA comprises a spacer sequence that is complementary to a segment of the 5′ locus and the second gRNA comprises a spacer sequence that is complementary to a segment of the 3′ locus.

34. The method of claim 22, wherein the human cell is a photoreceptor cell or retinal progenitor cell.

The application's sequence listing, which the Patent Office published only in electronic form, follows.

SEQUENCE LISTING (5406 sequences)

SEQ ID NO: 1 - protein, 1368 aa, Streptococcus pyogenes [sequence omitted]

SEQ ID NO: 2 - DNA, 4107 bp, Streptococcus pyogenes
  source 1..4107: mol_type = genomic DNA
atggataagaaatactcaataggcttagatatcggcacaaatagcgtcggatgggcggtgatcactgatgaatataaggttccgtctaaaaagttcaaggttctgggaaatacagaccgccacagtatcaaaaaaaatcttataggggctcttttatttgacagtggagagacagcggaagcgactcgtctcaaacggacagctcgtagaaggtatacacgtcggaagaatcgtatttgttatctacaggagattttttcaaatgagatggcgaaagtagatgatagtttctttcatcgacttgaagagtcttttttggtggaagaagacaagaagcatgaacgtcatcctatttttggaaatatagtagatgaagttgcttatcatgagaaatatccaactatctatcatctgcgaaaaaaattggtagattctactgataaagcggatttgcgcttaatctatttggccttagcgcatatgattaagtttcgtggtcattttttgattgagggagatttaaatcctgataatagtgatgtggacaaactatttatccagttggtacaaacctacaatcaattatttgaagaaaaccctattaacgcaagtggagtagatgctaaagcgattctttctgcacgattgagtaaatcaagacgattagaaaatctcattgctcagctccccggtgagaagaaaaatggcttatttgggaatctcattgctttgtcattgggtttgacccctaattttaaatcaaattttgatttggcagaagatgctaaattacagctttcaaaagatacttacgatgatgatttagataatttattggcgcaaattggagatcaatatgctgatttgtttttggcagctaagaatttatcagatgctattttactttcagatatcctaagagtaaatactgaaataactaaggctcccctatcagcttcaatgattaaacgctacgatgaacatcatcaagacttgactcttttaaaagctttagttcgacaacaacttccagaaaagtataaagaaatcttttttgatcaatcaaaaaacggatatgcaggttatattgatgggggagctagccaagaagaattttataaatttatcaaaccaattttagaaaaaatggatggtactgaggaattattggtgaaactaaatcgtgaagatttgctgcgcaagcaacggacctttgacaacggctctattccccatcaaattcacttgggtgagctgcatgctattttgagaagacaagaagacttttatccatttttaaaagacaatcgtgagaagattgaaaaaatcttgacttttcgaattccttattatgttggtccattggcgcgtggcaatagtcgttttgcatggatgactcggaagtctgaagaaacaattaccccatggaattttgaagaagttgtcgataaaggtgcttcagctcaatcatttattgaacgcatgacaaactttgataaaaatcttccaaatgaaaaagtactaccaaaacatagtttgctttatgagtattttacggtttataacgaattgacaaaggtcaaatatgttactgaaggaatgcgaaaaccagcatttctttcaggtgaacagaagaaagccattgttgatttactcttcaaaacaaatcgaaaagtaaccgttaagcaattaaaagaagattatttcaaaaaaatagaatgttttgatagtgttgaaatttcaggagttgaagatagatttaatgcttcattaggtacctaccatgatttgctaaaaattattaaagataaagattttttggataatgaagaaaatgaagatatcttagaggatattgttttaacattgaccttatttgaagatagggagatgattgaggaaagacttaaaacatatgctcacctctttgatgataaggtgatgaaacagcttaaacgtcgccgttatactggttggggacgtttgtctcgaaaattgattaatggtattagggataagcaatctggcaaaacaatattagattttttgaaatcagatggttttgccaatcgcaattttatgcagctgatccatgatgatagtttgacatttaaagaagacattcaaaaagcacaagtgtctggacaaggcgatagtttacatgaacatattgcaaatttagctggtagccctgctattaaaaaaggtattttacagactgtaaaagttgttgatgaattggtcaaagtaatggggcggcataagccagaaaatatcgttattgaaatggcacgtgaaaatcagacaactcaaaagggccagaaaaattcgcgagagcgtatgaaacgaatcgaagaaggtatcaaagaattaggaagtcagattcttaaagagcatcctgttgaaaatactcaattgcaaaatgaaaagctctatctctattatctccaaaatggaagagacatgtatgtggaccaagaattagatattaatcgtttaagtgattatgatgtcgatcacattgttccacaaagtttccttaaagacgattcaatagacaataaggtcttaacgcgttctgataaaaatcgtggtaaatcggataacgttccaagtgaagaagtagtcaaaaagatgaaaaactattggagacaacttctaaacgccaagttaatcactcaacgtaagtttgataatttaacgaaagctgaacgtggaggtttgagtgaacttgataaagctggttttatcaaacgccaattggttgaaactcgccaaatcactaagcatgtggcacaaattttggatagtcgcatgaatactaaatacgatgaaaatgataaacttattcgagaggttaaagtgattaccttaaaatctaaattagtttctgacttccgaaaagatttccaattctataaagtacgtgagattaacaattaccatcatgcccatgatgcgtatctaaatgccgtcgttggaactgctttgattaagaaatatccaaaacttgaatcggagtttgtctatggtgattataaagtttatgatgttcgtaaaatgattgctaagtctgagcaagaaataggcaaagcaaccgcaaaatatttcttttactctaatatcatgaacttcttcaaaacagaaattacacttgcaaatggagagattcgcaaacgccctctaatcgaaactaatggggaaactggagaaattgtctgggataaagggcgagattttgccacagtgcgcaaagtattgtccatgccccaagtcaatattgtcaagaaaacagaagtacagacaggcggattctccaaggagtcaattttaccaaaaagaaattcggacaagcttattgctcgtaaaaaagactgggatccaaaaaaatatggtggttttgatagtccaacggtagcttattcagtcctagtggttgctaaggtggaaaaagggaaatcgaagaagttaaaatccgttaaagagttactagggatcacaattatggaaagaagttcctttgaaaaaaatccgattgactttttagaagctaaaggatataaggaagttaaaaaagacttaatcattaaactacctaaatatagtctttttgagttagaaaacggtcgtaaacggatgctggctagtgccggagaattacaaaaaggaaatgagctggctctgccaagcaaatatgtgaattttttatatttagctagtcattatgaaaagttgaagggtagtccagaagataacgaacaaaaacaattgtttgtggagcagcataagcattatttagatgagattattgagcaaatcagtgaattttctaagcgtgttattttagcagatgccaatttagataaagttcttagtgcatataacaaacatagagacaaaccaatacgtgaacaagcagaaaatattattcatttatttacgttgacgaatcttggagctcccgctgcttttaaatattttgatacaacaattgatcgtaaacgatatacgtctacaaaagaagttttagatgccactcttatccatcaatccatcactggtctttatgaaacacgcattgatttgagtcagctaggaggtgactga

SEQ ID NO: 3 - DNA, 4107 bp, Streptococcus pyogenes
  source 1..4107: mol_type = genomic DNA
atggacaagaagtactccattgggctcgctatcggcacaaacagcgtcggctgggccgtcattacggacgagtacaaggtgccgagcaaaaaattcaaagttctgggcaataccgatcgccacagcataaagaagaacctcattggcgccctcctgttcgactccggggagacggccgaagccacgcggctcaaaagaacagcacggcgcagatatacccgcagaaagaatcggatctgctacctgcaggagatctttagtaatgagatggctaaggtggatgactctttcttccataggctggaggagtcctttttggtggaggaggataaaaagcacgagcgccacccaatctttggcaatatcgtggacgaggtggcgtaccatgaaaagtacccaaccatatatcatctgaggaagaagcttgtagacagtactgataaggctgacttgcggttgatctatctcgcgctggcgcatatgatcaaatttcggggacacttcctcatcgagggggacctgaacccagacaacagcgatgtcgacaaactctttatccaactggttcagacttacaatcagcttttcgaagagaacccgatcaacgcatccggagttgacgccaaagcaatcctgagcgctaggctgtccaaatcccggcggctcgaaaacctcatcgcacagctccctggggagaagaagaacggcctgtttggtaatcttatcgccctgtcactcgggctgacccccaactttaaatctaacttcgacctggccgaagatgccaagcttcaactgagcaaagacacctacgatgatgatctcgacaatctgctggcccagatcggcgaccagtacgcagacctttttttggcggcaaagaacctgtcagacgccattctgctgagtgatattctgcgagtgaacacggagatcaccaaagctccgctgagcgctagtatgatcaagcgctatgatgagcaccaccaagacttgactttgctgaaggcccttgtcagacagcaactgcctgagaagtacaaggaaattttcttcgatcagtctaaaaatggctacgccggatacattgacggcggagcaagccaggaggaattttacaaatttattaagcccatcttggaaaaaatggacggcaccgaggagctgctggtaaagcttaacagagaagatctgttgcgcaaacagcgcactttcgacaatggaagcatcccccaccagattcacctgggcgaactgcacgctatcctcaggcggcaagaggatttctacccctttttgaaagataacagggaaaagattgagaaaatcctcacatttcggataccctactatgtaggccccctcgcccggggaaattccagattcgcgtggatgactcgcaaatcagaagagaccatcactccctggaacttcgaggaagtcgtggataagggggcctctgcccagtccttcatcgaaaggatgactaactttgataaaaatctgcctaacgaaaaggtgcttcctaaacactctctgctgtacgagtacttcacagtttataacgagctcaccaaggtcaaatacgtcacagaagggatgagaaagccagcattcctgtctggagagcagaagaaagctatcgtggacctcctcttcaagacgaaccggaaagttaccgtgaaacagctcaaagaagactatttcaaaaagattgaatgtttcgactctgttgaaatcagcggagtggaggatcgcttcaacgcatccctgggaacgtatcacgatctcctgaaaatcattaaagacaaggacttcctggacaatgaggagaacgaggacattcttgaggacattgtcctcacccttacgttgtttgaagatagggagatgattgaagaacgcttgaaaacttacgctcatctcttcgacgacaaagtcatgaaacagctcaagaggcgccgatatacaggatgggggcggctgtcaagaaaactgatcaatgggatccgagacaagcagagtggaaagacaatcctggattttcttaagtccgatggatttgccaaccggaacttcatgcagttgatccatgatgactctctcacctttaaggaggacatccagaaagcacaagtttctggccagggggacagtcttcacgagcacatcgctaatcttgcaggtagcccagctatcaaaaagggaatactgcagaccgttaaggtcgtggatgaactcgtcaaagtaatgggaaggcataagcccgagaatatcgttatcgagatggcccgagagaaccaaactacccagaagggacagaagaacagtagggaaaggatgaagaggattgaagagggtataaaagaactggggtcccaaatccttaaggaacacccagttgaaaacacccagcttcagaatgagaagctctacctgtactacctgcagaacggcagggacatgtacgtggatcaggaactggacatcaatcggctctccgactacgacgtggctgctatcgtgccccagtcttttctcaaagatgattctattgataataaagtgttgacaagatccgataaagctagagggaagagtgataacgtcccctcagaagaagttgtcaagaaaatgaaaaattattggcggcagctgctgaacgccaaactgatcacacaacggaagttcgataatctgactaaggctgaacgaggtggcctgtctgagttggataaagccggcttcatcaaaaggcagcttgttgagacacgccagatcaccaagcacgtggcccaaattctcgattcacgcatgaacaccaagtacgatgaaaatgacaaactgattcgagaggtgaaagttattactctgaagtctaagctggtctcagatttcagaaaggactttcagttttataaggtgagagagatcaacaattaccaccatgcgcatgatgcctacctgaatgcagtggtaggcactgcacttatcaaaaaatatcccaagcttgaatctgaatttgtttacggagactataaagtgtacgatgttaggaaaatgatcgcaaagtctgagcaggaaataggcaaggccaccgctaagtacttcttttacagcaatattatgaattttttcaagaccgagattacactggccaatggagagattcggaagcgaccacttatcgaaacaaacggagaaacaggagaaatcgtgtgggacaagggtagggatttcgcgacagtccggaaggtcctgtccatgccgcaggtgaacatcgttaaaaagaccgaagtacagaccggaggcttctccaaggaaagtatcctcccgaaaaggaacagcgacaagctgatcgcacgcaaaaaagattgggaccccaagaaatacggcggattcgattctcctacagtcgcttacagtgtactggttgtggccaaagtggagaaagggaagtctaaaaaactcaaaagcgtcaaggaactgctgggcatcacaatcatggagcgatcaagcttcgaaaaaaaccccatcgactttctcgaggcgaaaggatataaagaggtcaaaaaagacctcatcattaagcttcccaagtactctctctttgagcttgaaaacggccggaaacgaatgctcgctagtgcgggcgagctgcagaaaggtaacgagctggcactgccctctaaatacgttaatttcttgtatctggccagccactatgaaaagctcaaagggtctcccgaagataatgagcagaagcagctgttcgtggaacaacacaaacactaccttgatgagatcatcgagcaaataagcgaattctccaaaagagtgatcctcgccgacgctaacctcgataaggtgctttctgcttacaataagcacagggataagcccatcagggagcaggcagaaaacattatccacttgtttactctgaccaacttgggcgcgcctgcagccttcaagtacttcgacaccaccatagacagaaagcggtacacctctacaaaggaggtcctggacgccacactgattcatcagtcaattacggggctctatgaaacaagaatcgacctctctcagctcggtggagactaa

SEQ ID NO: 4 - DNA, 4140 bp, Streptococcus pyogenes
  source 1..4140: mol_type = genomic DNA
atggacaagaagtactccattgggctcgatatcggcacaaacagcgtcggctgggccgtcattacggacgagtacaaggtgccgagcaaaaaattcaaagttctgggcaataccgatcgccacagcataaagaagaacctcattggcgccctcctgttcgactccggggagacggccgaagccacgcggctcaaaagaacagcacggcgcagatatacccgcagaaagaatcggatctgctacctgcaggagatctttagtaatgagatggctaaggtggatgactctttcttccataggctggaggagtcctttttggtggaggaggataaaaagcacgagcgccacccaatctttggcaatatcgtggacgaggtggcgtaccatgaaaagtacccaaccatatatcatctgaggaagaagcttgtagacagtactgataaggctgacttgcggttgatctatctcgcgctggcgcatatgatcaaatttcggggacacttcctcatcgagggggacctgaacccagacaacagcgatgtcgacaaactctttatccaactggttcagacttacaatcagcttttcgaagagaacccgatcaacgcatccggagttgacgccaaagcaatcctgagcgctaggctgtccaaatcccggcggctcgaaaacctcatcgcacagctccctggggagaagaagaacggcctgtttggtaatcttatcgccctgtcactcgggctgacccccaactttaaatctaacttcgacctggccgaagatgccaagcttcaactgagcaaagacacctacgatgatgatctcgacaatctgctggcccagatcggcgaccagtacgcagacctttttttggcggcaaagaacctgtcagacgccattctgctgagtgatattctgcgagtgaacacggagatcaccaaagctccgctgagcgctagtatgatcaagcgctatgatgagcaccaccaagacttgactttgctgaaggcccttgtcagacagcaactgcctgagaagtacaaggaaattttcttcgatcagtctaaaaatggctacgccggatacattgacggcggagcaagccaggaggaattttacaaatttattaagcccatcttggaaaaaatggacggcaccgaggagctgctggtaaagcttaacagagaagatctgttgcgcaaacagcgcactttcgacaatggaagcatcccccaccagattcacctgggcgaactgcacgctatcctcaggcggcaagaggatttctacccctttttgaaagataacagggaaaagattgagaaaatcctcacatttcggataccctactatgtaggccccctcgcccggggaaattccagattcgcgtggatgactcgcaaatcagaagagaccatcactccctggaacttcgaggaagtcgtggataagggggcctctgcccagtccttcatcgaaaggatgactaactttgataaaaatctgcctaacgaaaaggtgcttcctaaacactctctgctgtacgagtacttcacagtttataacgagctcaccaaggtcaaatacgtcacagaagggatgagaaagccagcattcctgtctggagagcagaagaaagctatcgtggacctcctcttcaagacgaaccggaaagttaccgtgaaacagctcaaagaagactatttcaaaaagattgaatgtttcgactctgttgaaatcagcggagtggaggatcgcttcaacgcatccctgggaacgtatcacgatctcctgaaaatcattaaagacaaggacttcctggacaatgaggagaacgaggacattcttgaggacattgtcctcacccttacgttgtttgaagatagggagatgattgaagaacgcttgaaaacttacgctcatctcttcgacgacaaagtcatgaaacagctcaagaggcgccgatatacaggatgggggcggctgtcaagaaaactgatcaatgggatccgagacaagcagagtggaaagacaatcctggattttcttaagtccgatggatttgccaaccggaacttcatgcagttgatccatgatgactctctcacctttaaggaggacatccagaaagcacaagtttctggccagggggacagtcttcacgagcacatcgctaatcttgcaggtagcccagctatcaaaaagggaatactgcagaccgttaaggtcgtggatgaactcgtcaaagtaatgggaaggcataagcccgagaatatcgttatcgagatggcccgagagaaccaaactacccagaagggacagaagaacagtagggaaaggatgaagaggattgaagagggtataaaagaactggggtcccaaatccttaaggaacacccagttgaaaacacccagcttcagaatgagaagctctacctgtactacctgcagaacggcagggacatgtacgtggatcaggaactggacatcaatcggctctccgactacgacgtggatcatatcgtgccccagtcttttctcaaagatgattctattgataataaagtgttgacaagatccgataaaaatagagggaagagtgataacgtcccctcagaagaagttgtcaagaaaatgaaaaattattggcggcagctgctgaacgccaaactgatcacacaacggaagttcgataatctgactaaggctgaacgaggtggcctgtctgagttggataaagccggcttcatcaaaaggcagcttgttgagacacgccagatcaccaagcacgtggcccaaattctcgattcacgcatgaacaccaagtacgatgaaaatgacaaactgattcgagaggtgaaagttattactctgaagtctaagctggtctcagatttcagaaaggactttcagttttataaggtgagagagatcaacaattaccaccatgcgcatgatgcctacctgaatgcagtggtaggcactgcacttatcaaaaaatatcccaagcttgaatctgaatttgtttacggagactataaagtgtacgatgttaggaaaatgatcgcaaagtctgagcaggaaataggcaaggccaccgctaagtacttcttttacagcaatattatgaattttttcaagaccgagattacactggccaatggagagattcggaagcgaccacttatcgaaacaaacggagaaacaggagaaatcgtgtgggacaagggtagggatttcgcgacagtccggaaggtcctgtccatgccgcaggtgaacatcgttaaaaagaccgaagtacagaccggaggcttctccaaggaaagtatcctcccgaaaaggaacagcgacaagctgatcgcacgcaaaaaagattgggaccccaagaaatacggcggattcgattctcctacagtcgcttacagtgtactggttgtggccaaagtggagaaagggaagtctaaaaaactcaaaagcgtcaaggaactgctgggcatcacaatcatggagcgatcaagcttcgaaaaaaaccccatcgactttctcgaggcgaaaggatataaagaggtcaaaaaagacctcatcattaagcttcccaagtactctctctttgagcttgaaaacggccggaaacgaatgctcgctagtgcgggcgagctgcagaaaggtaacgagctggcactgccctctaaatacgttaatttcttgtatctggccagccactatgaaaagctcaaagggtctcccgaagataatgagcagaagcagctgttcgtggaacaacacaaacactaccttgatgagatcatcgagcaaataagcgaattctccaaaagagtgatcctcgccgacgctaacctcgataaggtgctttctgcttacaataagcacagggataagcccatcagggagcaggcagaaaacattatccacttgtttactctgaccaacttgggcgcgcctgcagccttcaagtacttcgacaccaccatagacagaaagcggtacacctctacaaaggaggtcctggacgccacactgattcatcagtcaattacggggctctatgaaacaagaatcgacctctctcagctcggtggagacagcagggctgaccccaagaagaagaggaaggtgtga

SEQ ID NO: 5 - DNA, 4200 bp, Streptococcus pyogenes
  source 1..4200: mol_type = genomic DNA
atggacaagaagtactccattgggctcgatatcggcacaaacagcgtcggctgggccgtcattacggacgagtacaaggtgccgagcaaaaaattcaaagttctgggcaataccgatcgccacagcataaagaagaacctcattggcgccctcctgttcgactccggggagacggccgaagccacgcggctcaaaagaacagcacggcgcagatatacccgcagaaagaatcggatctgctacctgcaggagatctttagtaatgagatggctaaggtggatgactctttcttccataggctggaggagtcctttttggtggaggaggataaaaagcacgagcgccacccaatctttggcaatatcgtggacgaggtggcgtaccatgaaaagtacccaaccatatatcatctgaggaagaagcttgtagacagtactgataaggctgacttgcggttgatctatctcgcgctggcgcatatgatcaaatttcggggacacttcctcatcgagggggacctgaacccagacaacagcgatgtcgacaaactctttatccaactggttcagacttacaatcagcttttcgaagagaacccgatcaacgcatccggagttgacgccaaagcaatcctgagcgctaggctgtccaaatcccggcggctcgaaaacctcatcgcacagctccctggggagaagaagaacggcctgtttggtaatcttatcgccctgtcactcgggctgacccccaactttaaatctaacttcgacctggccgaagatgccaagcttcaactgagcaaagacacctacgatgatgatctcgacaatctgctggcccagatcggcgaccagtacgcagacctttttttggcggcaaagaacctgtcagacgccattctgctgagtgatattctgcgagtgaacacggagatcaccaaagctccgctgagcgctagtatgatcaagcgctatgatgagcaccaccaagacttgactttgctgaaggcccttgtcagacagcaactgcctgagaagtacaaggaaattttcttcgatcagtctaaaaatggctacgccggatacattgacggcggagcaagccaggaggaattttacaaatttattaagcccatcttggaaaaaatggacggcaccgaggagctgctggtaaagcttaacagagaagatctgttgcgcaaacagcgcactttcgacaatggaagcatcccccaccagattcacctgggcgaactgcacgctatcctcaggcggcaagaggatttctacccctttttgaaagataacagggaaaagattgagaaaatcctcacatttcggataccctactatgtaggccccctcgcccggggaaattccagattcgcgtggatgactcgcaaatcagaagagaccatcactccctggaacttcgaggaagtcgtggataagggggcctctgcccagtccttcatcgaaaggatgactaactttgataaaaatctgcctaacgaaaaggtgcttcctaaacactctctgctgtacgagtacttcacagtttataacgagctcaccaaggtcaaatacgtcacagaagggatgagaaagccagcattcctgtctggagagcagaagaaagctatcgtggacctcctcttcaagacgaaccggaaagttaccgtgaaacagctcaaagaagactatttcaaaaagattgaatgtttcgactctgttgaaatcagcggagtggaggatcgcttcaacgcatccctgggaacgtatcacgatctcctgaaaatcattaaagacaaggacttcctggacaatgaggagaacgaggacattcttgaggacattgtcctcacccttacgttgtttgaagatagggagatgattgaagaacgcttgaaaacttacgctcatctcttcgacgacaaagtcatgaaacagctcaagaggcgccgatatacaggatgggggcggctgtcaagaaaactgatcaatgggatccgagacaagcagagtggaaagacaatcctggattttcttaagtccgatggatttgccaaccggaacttcatgcagttgatccatgatgactctctcacctttaaggaggacatccagaaagcacaagtttctggccagggggacagtcttcacgagcacatcgctaatcttgcaggtagcccagctatcaaaaagggaatactgcagaccgttaaggtcgtggatgaactcgtcaaagtaatgggaaggcataagcccgagaatatcgttatcgagatggcccgagagaaccaaactacccagaagggacagaagaacagtagggaaaggatgaagaggattgaagagggtataaaagaactggggtcccaaatccttaaggaacacccagttgaaaacacccagcttcagaatgagaagctctacctgtactacctgcagaacggcagggacatgtacgtggatcaggaactggacatcaatcggctctccgactacgacgtggatcatatcgtgccccagtcttttctcaaagatgattctattgataataaagtgttgacaagatccgataaaaatagagggaagagtgataacgtcccctcagaagaagttgtcaagaaaatgaaaaattattggcggcagctgctgaacgccaaactgatcacacaacggaagttcgataatctgactaaggctgaacgaggtggcctgtctgagttggataaagccggcttcatcaaaaggcagcttgttgagacacgccagatcaccaagcacgtggcccaaattctcgattcacgcatgaacaccaagtacgatgaaaatgacaaactgattcgagaggtgaaagttattactctgaagtctaagctggtctcagatttcagaaaggactttcagttttataaggtgagagagatcaacaattaccaccatgcgcatgatgcctacctgaatgcagtggtaggcactgcacttatcaaaaaatatcccaagcttgaatctgaatttgtttacggagactataaagtgtacgatgttaggaaaatgatcgcaaagtctgagcaggaaataggcaaggccaccgctaagtacttcttttacagcaatattatgaattttttcaagaccgagattacactggccaatggagagattcggaagcgaccacttatcgaaacaaacggagaaacaggagaaatcgtgtgggacaagggtagggatttcgcgacagtccggaaggtcctgtccatgccgcaggtgaacatcgttaaaaagaccgaagtacagaccggaggcttctccaaggaaagtatcctcccgaaaaggaacagcgacaagctgatcgcacgcaaaaaagattgggaccccaagaaatacggcggattcgattctcctacagtcgcttacagtgtactggttgtggccaaagtggagaaagggaagtctaaaaaactcaaaagcgtcaaggaactgctgggcatcacaatcatggagcgatcaagcttcgaaaaaaaccccatcgactttctcgaggcgaaaggatataaagaggtcaaaaaagacctcatcattaagcttcccaagtactctctctttgagcttgaaaacggccggaaacgaatgctcgctagtgcgggcgagctgcagaaaggtaacgagctggcactgccctctaaatacgttaatttcttgtatctggccagccactatgaaaagctcaaagggtctcccgaagataatgagcagaagcagctgttcgtggaacaacacaaacactaccttgatgagatcatcgagcaaataagcgaattctccaaaagagtgatcctcgccgacgctaacctcgataaggtgctttctgcttacaataagcacagggataagcccatcagggagcaggcagaaaacattatccacttgtttactctgaccaacttgggcgcgcctgcagccttcaagtacttcgacaccaccatagacagaaagcggtacacctctacaaaggaggtcctggacgccacactgattcatcagtcaattacggggctctatgaaacaagaatcgacctctctcagctcggtggagacgcggccgcagatccaaaaaagaagagaaaggtagatccaaaaaagaagagaaaggtagatccaaaaaagaagagaaaggtagatacggccgcatag

SEQ ID NO: 6 - DNA, 4326 bp, Streptococcus pyogenes
  source 1..4326: mol_type = genomic DNA
atggacaagaagtactccattgggctcgctatcggcacaaacagcgtcggctgggccgtcattacggacgagtacaaggtgccgagcaaaaaattcaaagttctgggcaataccgatcgccacagcataaagaagaacctcattggcgccctcctgttcgactccggggagacggccgaagccacgcggctcaaaagaacagcacggcgcagatatacccgcagaaagaatcggatctgctacctgcaggagatctttagtaatgagatggctaaggtggatgactctttcttccataggctggaggagtcctttttggtggaggaggataaaaagcacgagcgccacccaatctttggcaatatcgtggacgaggtggcgtaccatgaaaagtacccaaccatatatcatctgaggaagaagcttgtagacagtactgataaggctgacttgcggttgatctatctcgcgctggcgcatatgatcaaatttcggggacacttcctcatcgagggggacctgaacccagacaacagcgatgtcgacaaactctttatccaactggttcagacttacaatcagcttttcgaagagaacccgatcaacgcatccggagttgacgccaaagcaatcctgagcgctaggctgtccaaatcccggcggctcgaaaacctcatcgcacagctccctggggagaagaagaacggcctgtttggtaatcttatcgccctgtcactcgggctgacccccaactttaaatctaacttcgacctggccgaagatgccaagcttcaactgagcaaagacacctacgatgatgatctcgacaatctgctggcccagatcggcgaccagtacgcagacctttttttggcggcaaagaacctgtcagacgccattctgctgagtgatattctgcgagtgaacacggagatcaccaaagctccgctgagcgctagtatgatcaagcgctatgatgagcaccaccaagacttgactttgctgaaggcccttgtcagacagcaactgcctgagaagtacaaggaaattttcttcgatcagtctaaaaatggctacgccggatacattgacggcggagcaagccaggaggaattttacaaatttattaagcccatcttggaaaaaatggacggcaccgaggagctgctggtaaagcttaacagagaagatctgttgcgcaaacagcgcactttcgacaatggaagcatcccccaccagattcacctgggcgaactgcacgctatcctcaggcggcaagaggatttctacccctttttgaaagataacagggaaaagattgagaaaatcctcacatttcggataccctactatgtaggccccctcgcccggggaaattccagattcgcgtggatgactcgcaaatcagaagagaccatcactccctggaacttcgaggaagtcgtggataagggggcctctgcccagtccttcatcgaaaggatgactaactttgataaaaatctgcctaacgaaaaggtgcttcctaaacactctctgctgtacgagtacttcacagtttataacgagctcaccaaggtcaaatacgtcacagaagggatgagaaagccagcattcctgtctggagagcagaagaaagctatcgtggacctcctcttcaagacgaaccggaaagttaccgtgaaacagctcaaagaagactatttcaaaaagattgaatgtttcgactctgttgaaatcagcggagtggaggatcgcttcaacgcatccctgggaacgtatcacgatctcctgaaaatcattaaagacaaggacttcctggacaatgaggagaacgaggacattcttgaggacattgtcctcacccttacgttgtttgaagatagggagatgattgaagaacgcttgaaaacttacgctcatctcttcgacgacaaagtcatgaaacagctcaagaggcgccgatatacaggatgggggcggctgtcaagaaaactgatcaatgggatccgagacaagcagagtggaaagacaatcctggattttcttaagtccgatggatttgccaaccggaacttcatgcagttgatccatgatgactctctcacctttaaggaggacatccagaaagcacaagtttctggccagggggacagtcttcacgagcacatcgctaatcttgcaggtagcccagctatcaaaaagggaatactgcagaccgttaaggtcgtggatgaactcgtcaaagtaatgggaaggcataagcccgagaatatcgttatcgagatggcccgagagaaccaaactacccagaagggacagaagaacagtagggaaaggatgaagaggattgaagagggtataaaagaactggggtcccaaatccttaaggaacacccagttgaaaacacccagcttcagaatgagaagctctacctgtactacctgcagaacggcagggacatgtacgtggatcaggaactggacatcaatcggctctccgactacgacgtggctgctatcgtgccccagtcttttctcaaagatgattctattgataataaagtgttgacaagatccgataaagctagagggaagagtgataacgtcccctcagaagaagttgtcaagaaaatgaaaaattattggcggcagctgctgaacgccaaactgatcacacaacggaagttcgataatctgactaaggctgaacgaggtggcctgtctgagttggataaagccggcttcatcaaaaggcagcttgttgagacacgccagatcaccaagcacgtggcccaaattctcgattcacgcatgaacaccaagtacgatgaaaatgacaaactgattcgagaggtgaaagttattactctgaagtctaagctggtctcagatttcagaaaggactttcagttttataaggtgagagagatcaacaattaccaccatgcgcatgatgcctacctgaatgcagtggtaggcactgcacttatcaaaaaatatcccaagcttgaatctgaatttgtttacggagactataaagtgtacgatgttaggaaaatgatcgcaaagtctgagcaggaaataggcaaggccaccgctaagtacttcttttacagcaatattatgaattttttcaagaccgagattacactggccaatggagagattcggaagcgaccacttatcgaaacaaacggagaaacaggagaaatcgtgtgggacaagggtagggatttcgcgacagtccggaaggtcctgtccatgccgcaggtgaacatcgttaaaaagaccgaagtacagaccggaggcttctccaaggaaagtatcctcccgaaaaggaacagcgacaagctgatcgcacgcaaaaaagattgggaccccaagaaatacggcggattcgattctcctacagtcgcttacagtgtactggttgtggccaaagtggagaaagggaagtctaaaaaactcaaaagcgtcaaggaactgctgggcatcacaatcatggagcgatcaagcttcgaaaaaaaccccatcgactttctcgaggcgaaaggatataaagaggtcaaaaaagacctcatcattaagcttcccaagtactctctctttgagcttgaaaacggccggaaacgaatgctcgctagtgcgggcgagctgcagaaaggtaacgagctggcactgccctctaaatacgttaatttcttgtatctggccagccactatgaaaagctcaaagggtctcccgaagataatgagcagaagcagctgttcgtggaacaacacaaacactaccttgatgagatcatcgagcaaataagcgaattctccaaaagagtgatcctcgccgacgctaacctcgataaggtgctttctgcttacaataagcacagggataagcccatcagggagcaggcagaaaacattatccacttgtttactctgaccaacttgggcgcgcctgcagccttcaagtacttcgacaccaccatagacagaaagcggtacacctctacaaaggaggtcctggacgccacactgattcatcagtcaattacggggctctatgaaacaagaatcgacctctctcagctcggtggagacagcagggctgaccccaagaagaagaggaaggtggaggccagcggttccggacgggctgacgcattggacgattttgatctggatatgctgggaagtgacgccctcgatgattttgaccttgacatgcttggttcggatgcccttgatgactttgacctcgacatgctcggcagtgacgcccttgatgatttcgacctggacatgctgattaactctagatga

SEQ ID NO: 7 - DNA, 4359 bp, Streptococcus pyogenes
  source 1..4359: mol_type = genomic DNA
atgcccaagaagaagaggaaggtgggaagggggatggacaagaagtactccattgggctcgctatcggcacaaacagcgtcggctgggccgtcattacggacgagtacaaggtgccgagcaaaaaattcaaagttctgggcaataccgatcgccacagcataaagaagaacctcattggcgccctcctgttcgactccggggagacggccgaagccacgcggctcaaaagaacagcacggcgcagatatacccgcagaaagaatcggatctgctacctgcaggagatctttagtaatgagatggctaaggtggatgactctttcttccataggctggaggagtcctttttggtggaggaggataaaaagcacgagcgccacccaatctttggcaatatcgtggacgaggtggcgtaccatgaaaagtacccaaccatatatcatctgaggaagaagcttgtagacagtactgataaggctgacttgcggttgatctatctcgcgctggcgcatatgatcaaatttcggggacacttcctcatcgagggggacctgaacccagacaacagcgatgtcgacaaactctttatccaactggttcagacttacaatcagcttttcgaagagaacccgatcaacgcatccggagttgacgccaaagcaatcctgagcgctaggctgtccaaatcccggcggctcgaaaacctcatcgcacagctccctggggagaagaagaacggcctgtttggtaatcttatcgccctgtcactcgggctgacccccaactttaaatctaacttcgacctggccgaagatgccaagcttcaactgagcaaagacacctacgatgatgatctcgacaatctgctggcccagatcggcgaccagtacgcagacctttttttggcggcaaagaacctgtcagacgccattctgctgagtgatattctgcgagtgaacacggagatcaccaaagctccgctgagcgctagtatgatcaagcgctatgatgagcaccaccaagacttgactttgctgaaggcccttgtcagacagcaactgcctgagaagtacaaggaaattttcttcgatcagtctaaaaatggctacgccggatacattgacggcggagcaagccaggaggaattttacaaatttattaagcccatcttggaaaaaatggacggcaccgaggagctgctggtaaagcttaacagagaagatctgttgcgcaaacagcgcactttcgacaatggaagcatcccccaccagattcacctgggcgaactgcacgctatcctcaggcggcaagaggatttctacccctttttgaaagataacagggaaaagattgagaaaatcctcacatttcggataccctactatgtaggccccctcgcccggggaaattccagattcgcgtggatgactcgcaaatcagaagagaccatcactccctggaacttcgaggaagtcgtggataagggggcctctgcccagtccttcatcgaaaggatgactaactttgataaaaatctgcctaacgaaaaggtgcttcctaaacactctctgctgtacgagtacttcacagtttataacgagctcaccaaggtcaaatacgtcacagaagggatgagaaagccagcattcctgtctggagagcagaagaaagctatcgtggacctcctcttcaagacgaaccggaaagttaccgtgaaacagctcaaagaagactatttcaaaaagattgaatgtttcgactctgttgaaatcagcggagtggaggatcgcttcaacgcatccctgggaacgtatcacgatctcctgaaaatcattaaagacaaggacttcctggacaatgaggagaacgaggacattcttgaggacattgtcctcacccttacgttgtttgaagatagggagatgattgaagaacgcttgaaaacttacgctcatctcttcgacgacaaagtcatgaaacagctcaagaggcgccgatatacaggatgggggcggctgtcaagaaaactgatcaatgggatccgagacaagcagagtggaaagacaatcctggattttcttaagtccgatggatttgccaaccggaacttcatgcagttgatccatgatgactctctcacctttaaggaggacatccagaaagcacaagtttctggccagggggacagtcttcacgagcacatcgctaatcttgcaggtagcccagctatcaaaaagggaatactgcagaccgttaaggtcgtggatgaactcgtcaaagtaatgggaaggcataagcccgagaatatcgttatcgagatggcccgagagaaccaaactacccagaagggacagaagaacagtagggaaaggatgaagaggattgaagagggtataaaagaactggggtcccaaatccttaaggaacacccagttgaaaacacccagcttcagaatgagaagctctacctgtactacctgcagaacggcagggacatgtacgtggatcaggaactggacatcaatcggctctccgactacgacgtggctgctatcgtgccccagtcttttctcaaagatgattctattgataataaagtgttgacaagatccgataaagctagagggaagagtgataacgtcccctcagaagaagttgtcaagaaaatgaaaaattattggcggcagctgctgaacgccaaactgatcacacaacggaagttcgataatctgactaaggctgaacgaggtggcctgtctgagttggataaagccggcttcatcaaaaggcagcttgttgagacacgccagatcaccaagcacgtggcccaaattctcgattcacgcatgaacaccaagtacgatgaaaatgacaaactgattcgagaggtgaaagttattactctgaagtctaagctggtctcagatttcagaaaggactttcagttttataaggtgagagagatcaacaattaccaccatgcgcatgatgcctacctgaatgcagtggtaggcactgcacttatcaaaaaatatcccaagcttgaatctgaatttgtttacggagactataaagtgtacgatgttaggaaaatgatcgcaaagtctgagcaggaaataggcaaggccaccgctaagtacttcttttacagcaatattatgaattttttcaagaccgagattacactggccaatggagagattcggaagcgaccacttatcgaaacaaacggagaaacaggagaaatcgtgtgggacaagggtagggatttcgcgacagtccggaaggtcctgtccatgccgcaggtgaacatcgttaaaaagaccgaagtacagaccggaggcttctccaaggaaagtatcctcccgaaaaggaacagcgacaagctgatcgcacgcaaaaaagattgggaccccaagaaatacggcggattcgattctcctacagtcgcttacagtgtactggttgtggccaaagtggagaaagggaagtctaaaaaactcaaaagcgtcaaggaactgctgggcatcacaatcatggagcgatcaagcttcgaaaaaaaccccatcgactttctcgaggcgaaaggatataaagaggtcaaaaaagacctcatcattaagcttcccaagtactctctctttgagcttgaaaacggccggaaacgaatgctcgctagtgcgggcgagctgcagaaaggtaacgagctggcactgccctctaaatacgttaatttcttgtatctggccagccactatgaaaagctcaaagggtctcccgaagataatgagcagaagcagctgttcgtggaacaacacaaacactaccttgatgagatcatcgagcaaataagcgaattctccaaaagagtgatcctcgccgacgctaacctcgataaggtgctttctgcttacaataagcacagggataagcccatcagggagcaggcagaaaacattatccacttgtttactctgaccaacttgggcgcgcctgcagccttcaagtacttcgacaccaccatagacagaaagcggtacacctctacaaaggaggtcctggacgccacactgattcatcagtcaattacggggctctatgaaacaagaatcgacctctctcagctcggtggagacagcagggctgaccccaagaagaagaggaaggtggaggccagcggttccggacgggctgacgcattggacgattttgatctggatatgctgggaagtgacgccctcgatgattttgaccttgacatgcttggttcggatgcccttgatgactttgacctcgacatgctcggcagtgacgcccttgatgatttcgacctggacatgctgattaactctagatga

SEQ ID NO: 8 - protein, 1409 aa, Streptococcus thermophiles
MLFNKCIIISINLDFSNKEKCMTKPYSIGLDIGTNSVGWAVITDNYKVPSKKMKVLGNTSKKYIKKNLLGVLLFDSGITAEGRRLKRTARRRYTRRRNRILYLQEIFSTEMATLDDAFFQRLDDSFLVPDDKRDSKYPIFGNLVEEKVYHDEFPTIYHLRKYLADSTKKADLRLVYLALAHMIKYRGHFLIEGEFNSKNNDIQKNFQDFLDTYNAIFESDLSLENSKQLEEIVKDKISKLEKKDRILKLFPGEKNSGIFSEFLKLIVGNQADFRKCFNLDEKASLHFSKESYDEDLETLLGYIGDDYSDVFLKAKKLYDAILLSGFLTVTDNETEAPLSSAMIKRYNEHKEDLALLKEYIRNISLKTYNEVFKDDTKNGYAGYIDGKTNQEDFYVYLKNLLAEFEGADYFLEKIDREDFLRKQRTFDNGSIPYQIHLQEMRAILDKQAKFYPFLAKNKERIEKILTFRIPYYVGPLARGNSDFAWSIRKRNEKITPWNFEDVIDKESSAEAFINRMTSFDLYLPEEKVLPKHSLLYETFNVYNELTKVRFIAESMRDYQFLDSKQKKDIVRLYFKDKRKVTDKDIIEYLHAIYGYDGIELKGIEKQFNSSLSTYHDLLNIINDKEFLDDSSNEAIIEEIIHTLTIFEDREMIKQRLSKFENIFDKSVLKKLSRRHYTGWGKLSAKLINGIRDEKSGNTILDYLIDDGISNRNFMQLIHDDALSFKKKIQKAQIIGDEDKGNIKEVVKSLPGSPAIKKGILQSIKIVDELVKVMGGRKPESIVVEMARENQYTNQGKSNSQQRLKRLEKSLKELGSKILKENIPAKLSKIDNNALQNDRLYLYYLQNGKDMYTGDDLDIDRLSNYDIDHIIPQAFLKDNSIDNKVLVSSASNRGKSDDFPSLEVVKKRKTFWYQLLKSKLISQRKFDNLTKAERGGLLPEDKAGFIQRQLVETRQITKHVARLLDEKFNNKKDENNRAVRTVKIITLKSTLVSQFRKDFELYKVREINDFHHAHDAYLNAVIASALLKKYPKLEPEFVYGDYPKYNSFRERKSATEKVYFYSNIMNIFKKSISLADGRVIERPLIEVNEETGESVWNKESDLATVRRVLSYPQVNVVKKVEEQNHGLDRGKPKGLFNANLSSKPKPNSNENLVGAKEYLDPKKYGGYAGISNSFAVLVKGTIEKGAKKKITNVLEFQGISILDRINYRKDKLNFLLEKGYKDIELIIELPKYSLFELSDGSRRMLASILSTNNKRGEIHKGNQIFLSQKFVKLLYHAKRISNTINENHRKYVENHKKEFEELFYYILEFNENYVGAKKNGKLLNSAFQSWQNHSIDELCSSFIGPTGSERKGLFELTSRGSAADFEFLGVKIPRYRDYTPSSLLKDATLIHQSVTGLYETRIDLAKLGEG

SEQ ID NO: 9 - DNA, 4167 bp, Streptococcus thermophiles
  source 1..4167: mol_type = genomic DNA
atgactaagccatactcaattggacttgatattggaacgaatagtgttggatgggctgtaataactgataattacaaggttccgtctaaaaaaatgaaagtcttaggaaatacgagtaaaaagtatatcaaaaagaacctgttaggtgtattactctttgactctggaatcacagcagaaggaagaagattgaagcgtactgcaagaagacgttatactagacgccgtaatcgtatcctttatttgcaggaaatttttagcacggagatggctacattagatgatgctttctttcaaagacttgacgattcgtttttagttcctgatgataaacgtgatagtaagtatccgatatttggaaacttagtagaagaaaaagtctatcatgatgaatttccaactatctatcatttaaggaaatatttagcagatagtactaaaaaagcagatttgcgtctagtttatcttgcattggctcatatgattaaatatagaggtcacttcttaattgaaggagagtttaattcaaaaaataatgatattcagaagaattttcaagactttttggacacttataatgctatttttgaatcggatttatcacttgagaatagtaaacaacttgaggaaattgttaaagataagattagtaaattagaaaagaaagatcgtattttaaaactcttccctggggagaagaattcggggattttttcagagtttctaaagttgattgtaggaaatcaagctgattttaggaaatgttttaatttagacgaaaaagcctccttacatttttccaaagaaagctatgatgaagatttagagactttgttaggttatattggagatgattacagtgatgtctttctcaaagcaaagaaactttatgatgctattcttttatcgggttttctgactgtaactgataatgagacagaagcacctctctcttctgctatgataaagcgatataatgaacacaaagaagatttagcgttactaaaggaatatataagaaatatttcactaaaaacgtataatgaagtatttaaagatgacaccaaaaatggttatgctggttatattgatggaaaaacaaatcaggaagatttctacgtatatctaaaaaacctattggctgaatttgaaggtgcggattattttcttgaaaaaattgatcgagaagattttttgagaaagcaacgtacatttgacaatggttcgataccatatcagattcatcttcaagaaatgagagcaattcttgataagcaagctaaattttatcctttcttggctaaaaataaagaaagaatcgagaagattttaaccttccgaattccttattatgtaggtccacttgcgagagggaatagtgattttgcctggtcaataagaaaacgaaatgaaaaaattacaccttggaattttgaggacgttattgacaaagaatcttcggcagaggctttcattaatcgaatgactagttttgatttgtatttgccagaagagaaggtacttccaaagcatagtctcttatacgaaacttttaatgtatataatgaattaacaaaagttagatttattgccgaaagtatgagagattatcaatttttagatagtaagcagaagaaagatattgttagactttattttaaagataaaaggaaagttactgataaggatattattgaatatttacatgcaatttatgggtatgatggaattgaattaaaaggcatagagaaacagtttaattctagtttatctacttatcacgatcttttaaatattattaatgataaagagtttttggatgatagttcaaatgaagcgattatcgaagaaattatccatactttgacaatttttgaagatagagagatgataaaacaacgtctttcaaaatttgagaatatattcgataaatccgttttgaaaaagttatctcgtagacattacactggctggggtaagttatctgctaagcttattaatggtattcgagatgaaaaatctggtaatactattcttgattacttaattgatgatggtatttctaaccgtaatttcatgcaacttattcacgatgatgctctttcttttaaaaagaagatacagaaagcacaaattattggtgacgaagataaaggtaatattaaagaggtcgttaagtctttgccaggtagtcctgcgattaaaaaaggtattttacaaagcataaaaattgtagatgaattggtcaaagtaatgggaggaagaaaacccgagtcaattgttgttgagatggctcgtgaaaatcaatataccaatcaaggtaagtctaattcccaacaacgcttgaaacgtttagaaaaatctctcaaagagttaggtagtaagatacttaaggaaaatattcctgcaaaactttctaaaatagacaataacgcacttcaaaatgatcgactttacttatactatcttcaaaatggaaaagatatgtataccggagatgatttagatattgatagattaagtaattatgatattgatcatattattcctcaagcttttttgaaagataattctattgacaataaagtacttgtttcatctgctagtaaccgtggtaaatcagatgattttccaagtttagaggttgtcaaaaaaagaaagacattttggtatcaattattgaaatcaaaattaatttctcaacgaaaatttgataatctgacaaaagctgaacggggaggattgttacctgaggacaaagctggttttattcaacgccagttggttgaaacacgtcaaataacaaaacatgtagctcgtttacttgatgagaaatttaataataaaaaagatgaaaataatagagcggtacgaacagtaaaaattattaccttgaaatctaccttagtttctcaatttcgtaaggattttgaactttataaagttcgtgaaatcaatgattttcatcatgctcatgatgcttacttgaatgccgttatagcaagtgctttacttaagaaataccctaaactagagccagaatttgtgtacggtgattatccaaaatacaatagttttagagaaagaaagtccgctacagaaaaggtatatttctattcaaatatcatgaatatctttaaaaaatctatttctttagctgatggtagagttattgaaagaccacttattgaggtaaatgaggagaccggcgaatccgtttggaataaagaatctgatttagcaactgtaaggagagtactctcttatccgcaagtaaatgttgtgaaaaaagttgaggaacagaatcacggattggatagaggaaaaccaaagggattgtttaatgcaaatctttcctcaaagccaaaaccaaatagtaatgaaaatttagtaggtgctaaagagtatcttgaccccaaaaagtatggggggtatgctggaatttctaattcttttgctgttcttgttaaagggacaattgaaaaaggtgctaagaaaaaaataacaaatgtactagaatttcaaggtatttctattttagataggattaattatagaaaagataaacttaattttttacttgaaaaaggttataaagatattgagttaattattgaactacctaaatatagtttatttgaactttcagatggttcacgtcgtatgttggctagtattttgtcaacgaataataagaggggagagattcacaaaggaaatcagatttttctttcacagaagtttgtgaaattactttatcatgctaagagaataagtaacacaattaatgagaatcatagaaaatatgttgagaaccataaaaaagagtttgaagaattattttactacattcttgagtttaatgagaattatgttggagctaaaaagaatggtaaacttttaaactctgcctttcaatcttggcaaaatcatagtatagatgaactctgtagtagttttataggacctaccggaagtgaaagaaaggggctatttgaattaacctctcgtggaagtgctgctgattttgaatttttaggtgttaaaattccaaggtatagagactataccccatcatccctattaaaagatgccacacttattcatcaatctgttacaggcctctatgaaacacgaatagaccttgccaaactaggagagggttaa

SEQ ID NO: 10 - DNA, 3366 bp, Streptococcus thermophilus
  source 1..3366: mol_type = genomic DNA
atgagcgacctggtgctgggcctggacatcggcatcggcagcgtgggcgtgggcatcctgaacaaggtgaccggcgagatcatccacaagaacagtcgcatcttccctgctgctcaggctgagaacaacctggtgcgccgcaccaaccgccagggtcgccggcttgctcgccgcaagaagcaccggcgcgtgcgcctgaaccgcctgttcgaggagagcggcctgatcaccgacttcaccaagatcagcatcaacctgaacccctaccagctgcgcgtgaagggcctgaccgacgagctgagcaacgaggagctgttcatcgccctgaagaacatggtgaagcaccgcggcatcagctacctggacgacgccagcgacgacggcaacagcagcgtgggcgactacgcccagatcgtgaaggagaacagcaagcagctggagaccaagacccccggccagatccagctggagcgctaccagacctacggccagctgcgcggcgacttcaccgtggagaaggacggcaagaagcaccgcctgatcaacgtgttccccaccagcgcctaccgcagcgaggccctgcgcatcctgcagacccagcaggagttcaacccccagatcaccgacgagttcatcaaccgctacctggagatcctgaccggcaagcgcaagtactaccacggccccggcaacgagaagagccgcaccgactacggccgctaccgcaccagcggcgagaccctggacaacatcttcggcatcctgatcggcaagtgcaccttctaccccgacgagttccgcgccgccaaggccagctacaccgcccaggagttcaacctgctgaacgacctgaacaacctgaccgtgcccaccgagaccaagaagctgagcaaggagcagaagaaccagatcatcaactacgtgaagaacgagaaggccatgggccccgccaagctgttcaagtacatcgccaagctgctgagctgcgacgtggccgacatcaagggctaccgcatcgacaagagcggcaaggccgagatccacaccttcgaggcctaccgcaagatgaagaccctggagaccctggacatcgagcagatggaccgcgagaccctggacaagctggcctacgtgctgaccctgaacaccgagcgcgagggcatccaggaggccctggagcacgagttcgccgacggcagcttcagccagaagcaggtggacgagctggtgcagttccgcaaggccaacagcagcatcttcggcaagggctggcacaacttcagcgtgaagctgatgatggagctgatccccgagctgtacgagaccagcgaggagcagatgaccatcctgacccgcctgggcaagcagaagaccaccagcagcagcaacaagaccaagtacatcgacgagaagctgctgaccgaggagatctacaaccccgtggtggccaagagcgtgcgccaggccatcaagatcgtgaacgccgccatcaaggagtacggcgacttcgacaacatcgtgatcgagatggcccgcgagaccaacgaggacgacgagaagaaggccatccagaagatccagaaggccaacaaggacgagaaggacgccgccatgctgaaggccgccaaccagtacaacggcaaggccgagctgccccacagcgtgttccacggccacaagcagctggccaccaagatccgcctgtggcaccagcagggcgagcgctgcctgtacaccggcaagaccatcagcatccacgacctgatcaacaacagcaaccagttcgaggtggaccacatcctgcccctgagcatcaccttcgacgacagcctggccaacaaggtgctggtgtacgccaccgccaaccaggagaagggccagcgcaccccctaccaggccctggacagcatggacgacgcctggagcttccgcgagctgaaggccttcgtgcgcgagagcaagaccctgagcaacaagaagaaggagtacctgctgaccgaggaggacatcagcaagttcgacgtgcgcaagaagttcatcgagcgcaacctggtggacacccgctacgccagccgcgtggtgctgaacgccctgcaggagcacttccgcgcccacaagatcgacaccaaggtgagcgtggtgcgcggccagttcaccagccagctgcgccgccactggggcatcgagaagacccgcgacacctaccaccaccacgccgtggacgccctgatcattgcggcttctagccagctgaacctgtggaagaagcagaagaacaccctggtgagctacagcgaggaccagctgctggacatcgagaccggcgagctgatcagcgacgacgagtacaaggagagcgtgttcaaggccccctaccagcacttcgtggacaccctgaagagcaaggagttcgaggacagcatcctgttcagctaccaggtggacagcaagttcaaccgcaagatcagcgacgccaccatctacgccacccgccaggccaaggtgggcaaggacaaggccgacgagacctacgtgctgggcaagatcaaggacatctacacccaggacggctacgacgccttcatgaagatctacaagaaggacaagagcaagttcctgatgtaccgccacgacccccagaccttcgagaaggtgatcgagcccatcctggagaactaccccaacaagcagatcaacgataaaggcaaggaggtgccctgcaaccccttcctgaagtacaaggaggagcacggctacatccgcaagtacagcaagaagggcaacggccccgagatcaagagcctgaagtactacgacagcaagctgggcaaccacatcgacatcacccccaaggacagcaacaacaaggtggtgctgcagagcgtgagcccctggcgcgccgacgtgtacttcaacaagaccaccggcaagtacgagatcctgggcctgaagtacgccgacctgcagtttgataagggcaccggcacctacaagatcagccaggagaagtacaacgacatcaagaagaaggagggcgtggacagcgacagcgagttcaagttcaccctgtacaagaacgaccttctgctggtgaaggacaccgagaccaaggagcaacagctgttccgcttcctgagccgcaccatgcccaagcagaagcactacgtggagctgaagccctacgacaagcagaagttcgagggcggcgaggccctgatcaaggtgctgggcaacgtggccaacagcggccagtgcaagaagggcctgggcaagagcaacatcagcatctacaaggtgcgcaccgacgtgctgggcaaccagcacatcatcaagaacgagggcgacaagcccaagctggacttctaa

SEQ ID NO: 11 - DNA, 3366 bp, Streptococcus thermophilus
  source 1..3366: mol_type = genomic DNA
atgagcgacctggtgctgggcctggccatcggcatcggcagcgtgggcgtgggcatcctgaacaaggtgaccggcgagatcatccacaagaacagtcgcatcttccctgctgctcaggctgagaacaacctggtgcgccgcaccaaccgccagggtcgccggcttgctcgccgcaagaagcaccggcgcgtgcgcctgaaccgcctgttcgaggagagcggcctgatcaccgacttcaccaagatcagcatcaacctgaacccctaccagctgcgcgtgaagggcctgaccgacgagctgagcaacgaggagctgttcatcgccctgaagaacatggtgaagcaccgcggcatcagctacctggacgacgccagcgacgacggcaacagcagcgtgggcgactacgcccagatcgtgaaggagaacagcaagcagctggagaccaagacccccggccagatccagctggagcgctaccagacctacggccagctgcgcggcgacttcaccgtggagaaggacggcaagaagcaccgcctgatcaacgtgttccccaccagcgcctaccgcagcgaggccctgcgcatcctgcagacccagcaggagttcaacccccagatcaccgacgagttcatcaaccgctacctggagatcctgaccggcaagcgcaagtactaccacggccccggcaacgagaagagccgcaccgactacggccgctaccgcaccagcggcgagaccctggacaacatcttcggcatcctgatcggcaagtgcaccttctaccccgacgagttccgcgccgccaaggccagctacaccgcccaggagttcaacctgctgaacgacctgaacaacctgaccgtgcccaccgagaccaagaagctgagcaaggagcagaagaaccagatcatcaactacgtgaagaacgagaaggccatgggccccgccaagctgttcaagtacatcgccaagctgctgagctgcgacgtggccgacatcaagggctaccgcatcgacaagagcggcaaggccgagatccacaccttcgaggcctaccgcaagatgaagaccctggagaccctggacatcgagcagatggaccgcgagaccctggacaagctggcctacgtgctgaccctgaacaccgagcgcgagggcatccaggaggccctggagcacgagttcgccgacggcagcttcagccagaagcaggtggacgagctggtgcagttccgcaaggccaacagcagcatcttcggcaagggctggcacaacttcagcgtgaagctgatgatggagctgatccccgagctgtacgagaccagcgaggagcagatgaccatcctgacccgcctgggcaagcagaagaccaccagcagcagcaacaagaccaagtacatcgacgagaagctgctgaccgaggagatctacaaccccgtggtggccaagagcgtgcgccaggccatcaagatcgtgaacgccgccatcaaggagtacggcgacttcgacaacatcgtgatcgagatggcccgcgagaccaacgaggacgacgagaagaaggccatccagaagatccagaaggccaacaaggacgagaaggacgccgccatgctgaaggccgccaaccagtacaacggcaaggccgagctgccccacagcgtgttccacggccacaagcagctggccaccaagatccgcctgtggcaccagcagggcgagcgctgcctgtacaccggcaagaccatcagcatccacgacctgatcaacaacagcaaccagttcgaggtggctgccatcctgcccctgagcatcaccttcgacgacagcctggccaacaaggtgctggtgtacgccaccgccgctcaggagaagggccagcgcaccccctaccaggccctggacagcatggacgacgcctggagcttccgcgagctgaaggccttcgtgcgcgagagcaagaccctgagcaacaagaagaaggagtacctgctgaccgaggaggacatcagcaagttcgacgtgcgcaagaagttcatcgagcgcaacctggtggacacccgctacgccagccgcgtggtgctgaacgccctgcaggagcacttccgcgcccacaagatcgacaccaaggtgagcgtggtgcgcggccagttcaccagccagctgcgccgccactggggcatcgagaagacccgcgacacctaccaccaccacgccgtggacgccctgatcattgcggcttctagccagctgaacctgtggaagaagcagaagaacaccctggtgagctacagcgaggaccagctgctggacatcgagaccggcgagctgatcagcgacgacgagtacaaggagagcgtgttcaaggccccctaccagcacttcgtggacaccctgaagagcaaggagttcgaggacagcatcctgttcagctaccaggtggacagcaagttcaaccgcaagatcagcgacgccaccatctacgccacccgccaggccaaggtgggcaaggacaaggccgacgagacctacgtgctgggcaagatcaaggacatctacacccaggacggctacgacgccttcatgaagatctacaagaaggacaagagcaagttcctgatgtaccgccacgacccccagaccttcgagaaggtgatcgagcccatcctggagaactaccccaacaagcagatcaacgataaaggcaaggaggtgccctgcaaccccttcctgaagtacaaggaggagcacggctacatccgcaagtacagcaagaagggcaacggccccgagatcaagagcctgaagtactacgacagcaagctgggcaaccacatcgacatcacccccaaggacagcaacaacaaggtggtgctgcagagcgtgagcccctggcgcgccgacgtgtacttcaacaagaccaccggcaagtacgagatcctgggcctgaagtacgccgacctgcagtttgataagggcaccggcacctacaagatcagccaggagaagtacaacgacatcaagaagaaggagggcgtggacagcgacagcgagttcaagttcaccctgtacaagaacgaccttctgctggtgaaggacaccgagaccaaggagcaacagctgttccgcttcctgagccgcaccatgcccaagcagaagcactacgtggagctgaagccctacgacaagcagaagttcgagggcggcgaggccctgatcaaggtgctgggcaacgtggccaacagcggccagtgcaagaagggcctgggcaagagcaacatcagcatctacaaggtgcgcaccgacgtgctgggcaaccagcacatcatcaagaacgagggcgacaagcccaagctggacttctaa

SEQ ID NO: 12 - DNA, 3399 bp, Streptococcus thermophilus
  source 1..3399: mol_type = genomic DNA
atgagcgacctggtgctgggcctggacatcggcatcggcagcgtgggcgtgggcatcctgaacaaggtgaccggcgagatcatccacaagaacagtcgcatcttccctgctgctcaggctgagaacaacctggtgcgccgcaccaaccgccagggtcgccggcttgctcgccgcaagaagcaccggcgcgtgcgcctgaaccgcctgttcgaggagagcggcctgatcaccgacttcaccaagatcagcatcaacctgaacccctaccagctgcgcgtgaagggcctgaccgacgagctgagcaacgaggagctgttcatcgccctgaagaacatggtgaagcaccgcggcatcagctacctggacgacgccagcgacgacggcaacagcagcgtgggcgactacgcccagatcgtgaaggagaacagcaagcagctggagaccaagacccccggccagatccagctggagcgctaccagacctacggccagctgcgcggcgacttcaccgtggagaaggacggcaagaagcaccgcctgatcaacgtgttccccaccagcgcctaccgcagcgaggccctgcgcatcctgcagacccagcaggagttcaacccccagatcaccgacgagttcatcaaccgctacctggagatcctgaccggcaagcgcaagtactaccacggccccggcaacgagaagagccgcaccgactacggccgctaccgcaccagcggcgagaccctggacaacatcttcggcatcctgatcggcaagtgcaccttctaccccgacgagttccgcgccgccaaggccagctacaccgcccaggagttcaacctgctgaacgacctgaacaacctgaccgtgcccaccgagaccaagaagctgagcaaggagcagaagaaccagatcatcaactacgtgaagaacgagaaggccatgggccccgccaagctgttcaagtacatcgccaagctgctgagctgcgacgtggccgacatcaagggctaccgcatcgacaagagcggcaaggccgagatccacaccttcgaggcctaccgcaagatgaagaccctggagaccctggacatcgagcagatggaccgcgagaccctggacaagctggcctacgtgctgaccctgaacaccgagcgcgagggcatccaggaggccctggagcacgagttcgccgacggcagcttcagccagaagcaggtggacgagctggtgcagttccgcaaggccaacagcagcatcttcggcaagggctggcacaacttcagcgtgaagctgatgatggagctgatccccgagctgtacgagaccagcgaggagcagatgaccatcctgacccgcctgggcaagcagaagaccaccagcagcagcaacaagaccaagtacatcgacgagaagctgctgaccgaggagatctacaaccccgtggtggccaagagcgtgcgccaggccatcaagatcgtgaacgccgccatcaaggagtacggcgacttcgacaacatcgtgatcgagatggcccgcgagaccaacgaggacgacgagaagaaggccatccagaagatccagaaggccaacaaggacgagaaggacgccgccatgctgaaggccgccaaccagtacaacggcaaggccgagctgccccacagcgtgttccacggccacaagcagctggccaccaagatccgcctgtggcaccagcagggcgagcgctgcctgtacaccggcaagaccatcagcatccacgacctgatcaacaacagcaaccagttcgaggtggaccacatcctgcccctgagcatcaccttcgacgacagcctggccaacaaggtgctggtgtacgccaccgccaaccaggagaagggccagcgcaccccctaccaggccctggacagcatggacgacgcctggagcttccgcgagctgaaggccttcgtgcgcgagagcaagaccctgagcaacaagaagaaggagtacctgctgaccgaggaggacatcagcaagttcgacgtgcgcaagaagttcatcgagcgcaacctggtggacacccgctacgccagccgcgtggtgctgaacgccctgcaggagcacttccgcgcccacaagatcgacaccaaggtgagcgtggtgcgcggccagttcaccagccagctgcgccgccactggggcatcgagaagacccgcgacacctaccaccaccacgccgtggacgccctgatcattgcggcttctagccagctgaacctgtggaagaagcagaagaacaccctggtgagctacagcgaggaccagctgctggacatcgagaccggcgagctgatcagcgacgacgagtacaaggagagcgtgttcaaggccccctaccagcacttcgtggacaccctgaagagcaaggagttcgaggacagcatcctgttcagctaccaggtggacagcaagttcaaccgcaagatcagcgacgccaccatctacgccacccgccaggccaaggtgggcaaggacaaggccgacgagacctacgtgctgggcaagatcaaggacatctacacccaggacggctacgacgccttcatgaagatctacaagaaggacaagagcaagttcctgatgtaccgccacgacccccagaccttcgagaaggtgatcgagcccatcctggagaactaccccaacaagcagatcaacgataaaggcaaggaggtgccctgcaaccccttcctgaagtacaaggaggagcacggctacatccgcaagtacagcaagaagggcaacggccccgagatcaagagcctgaagtactacgacagcaagctgggcaaccacatcgacatcacccccaaggacagcaacaacaaggtggtgctgcagagcgtgagcccctggcgcgccgacgtgtacttcaacaagaccaccggcaagtacgagatcctgggcctgaagtacgccgacctgcagtttgataagggcaccggcacctacaagatcagccaggagaagtacaacgacatcaagaagaaggagggcgtggacagcgacagcgagttcaagttcaccctgtacaagaacgaccttctgctggtgaaggacaccgagaccaaggagcaacagctgttccgcttcctgagccgcaccatgcccaagcagaagcactacgtggagctgaagccctacgacaagcagaagttcgagggcggcgaggccctgatcaaggtgctgggcaacgtggccaacagcggccagtgcaagaagggcctgggcaagagcaacatcagcatctacaaggtgcgcaccgacgtgctgggcaaccagcacatcatcaagaacgagggcgacaagcccaagctggacttcagcagggctgaccccaagaagaagaggaaggtgtga

SEQ ID NO: 13 - DNA, 3459 bp, Streptococcus thermophilus
  source 1..3459: mol_type = genomic DNA
atgagcgacctggtgctgggcctggacatcggcatcggcagcgtgggcgtgggcatcctgaacaaggtgaccggcgagatcatccacaagaacagtcgcatcttccctgctgctcaggctgagaacaacctggtgcgccgcaccaaccgccagggtcgccggcttgctcgccgcaagaagcaccggcgcgtgcgcctgaaccgcctgttcgaggagagcggcctgatcaccgacttcaccaagatcagcatcaacctgaacccctaccagctgcgcgtgaagggcctgaccgacgagctgagcaacgaggagctgttcatcgccctgaagaacatggtgaagcaccgcggcatcagctacctggacgacgccagcgacgacggcaacagcagcgtgggcgactacgcccagatcgtgaaggagaacagcaagcagctggagaccaagacccccggccagatccagctggagcgctaccagacctacggccagctgcgcggcgacttcaccgtggagaaggacggcaagaagcaccgcctgatcaacgtgttccccaccagcgcctaccgcagcgaggccctgcgcatcctgcagacccagcaggagttcaacccccagatcaccgacgagttcatcaaccgctacctggagatcctgaccggcaagcgcaagtactaccacggccccggcaacgagaagagccgcaccgactacggccgctaccgcaccagcggcgagaccctggacaacatcttcggcatcctgatcggcaagtgcaccttctaccccgacgagttccgcgccgccaaggccagctacaccgcccaggagttcaacctgctgaacgacctgaacaacctgaccgtgcccaccgagaccaagaagctgagcaaggagcagaagaaccagatcatcaactacgtgaagaacgagaaggccatgggccccgccaagctgttcaagtacatcgccaagctgctgagctgcgacgtggccgacatcaagggctaccgcatcgacaagagcggcaaggccgagatccacaccttcgaggcctaccgcaagatgaagaccctggagaccctggacatcgagcagatggaccgcgagaccctggacaagctggcctacgtgctgaccctgaacaccgagcgcgagggcatccaggaggccctggagcacgagttcgccgacggcagcttcagccagaagcaggtggacgagctggtgcagttccgcaaggccaacagcagcatcttcggcaagggctggcacaacttcagcgtgaagctgatgatggagctgatccccgagctgtacgagaccagcgaggagcagatgaccatcctgacccgcctgggcaagcagaagaccaccagcagcagcaacaagaccaagtacatcgacgagaagctgctgaccgaggagatctacaaccccgtggtggccaagagcgtgcgccaggccatcaagatcgtgaacgccgccatcaaggagtacggcgacttcgacaacatcgtgatcgagatggcccgcgagaccaacgaggacgacgagaagaaggccatccagaagatccagaaggccaacaaggacgagaaggacgccgccatgctgaaggccgccaaccagtacaacggcaaggccgagctgccccacagcgtgttccacggccacaagcagctggccaccaagatccgcctgtggcaccagcagggcgagcgctgcctgtacaccggcaagaccatcagcatccacgacctgatcaacaacagcaaccagttcgaggtggaccacatcctgcccctgagcatcaccttcgacgacagcctggccaacaaggtgctggtgtacgccaccgccaaccaggagaagggccagcgcaccccctaccaggccctggacagcatggacgacgcctggagcttccgcgagctgaaggccttcgtgcgcgagagcaagaccctgagcaacaagaagaaggagtacctgctgaccgaggaggacatcagcaagttcgacgtgcgcaagaagttcatcgagcgcaacctggtggacacccgctacgccagccgcgtggtgctgaacgccctgcaggagcacttccgcgcccacaagatcgacaccaaggtgagcgtggtgcgcggccagttcaccagccagctgcgccgccactggggcatcgagaagacccgcgacacctaccaccaccacgccgtggacgccctgatcattgcggcttctagccagctgaacctgtggaagaagcagaagaacaccctggtgagctacagcgaggaccagctgctggacatcgagaccggcgagctgatcagcgacgacgagtacaaggagagcgtgttcaaggccccctaccagcacttcgtggacaccctgaagagcaaggagttcgaggacagcatcctgttcagctaccaggtggacagcaagttcaaccgcaagatcagcgacgccaccatctacgccacccgccaggccaaggtgggcaaggacaaggccgacgagacctacgtgctgggcaagatcaaggacatctacacccaggacggctacgacgccttcatgaagatctacaagaaggacaagagcaagttcctgatgtaccgccacgacccccagaccttcgagaaggtgatcgagcccatcctggagaactaccccaacaagcagatcaacgataaaggcaaggaggtgccctgcaaccccttcctgaagtacaaggaggagcacggctacatccgcaagtacagcaagaagggcaacggccccgagatcaagagcctgaagtactacgacagcaagctgggcaaccacatcgacatcacccccaaggacagcaacaacaaggtggtgctgcagagcgtgagcccctggcgcgccgacgtgtacttcaacaagaccaccggcaagtacgagatcctgggcctgaagtacgccgacctgcagtttgataagggcaccggcacctacaagatcagccaggagaagtacaacgacatcaagaagaaggagggcgtggacagcgacagcgagttcaagttcaccctgtacaagaacgaccttctgctggtgaaggacaccgagaccaaggagcaacagctgttccgcttcctgagccgcaccatgcccaagcagaagcactacgtggagctgaagccctacgacaagcagaagttcgagggcggcgaggccctgatcaaggtgctgggcaacgtggccaacagcggccagtgcaagaagggcctgggcaagagcaacatcagcatctacaaggtgcgcaccgacgtgctgggcaaccagcacatcatcaagaacgagggcgacaagcccaagctggacttcgcggccgcagatccaaaaaagaagagaaaggtagatccaaaaaagaagagaaaggtagatccaaaaaagaagagaaaggtagatacggccgcatag

SEQ ID NO: 14 - DNA, 3585 bp, Streptococcus thermophilus
  source 1..3585: mol_type = genomic DNA
atgagcgacctggtgctgggcctggccatcggcatcggcagcgtgggcgtgggcatcctgaacaaggtgaccggcgagatcatccacaagaacagtcgcatcttccctgctgctcaggctgagaacaacctggtgcgccgcaccaaccgccagggtcgccggcttgctcgccgcaagaagcaccggcgcgtgcgcctgaaccgcctgttcgaggagagcggcctgatcaccgacttcaccaagatcagcatcaacctgaacccctaccagctgcgcgtgaagggcctgaccgacgagctgagcaacgaggagctgttcatcgccctgaagaacatggtgaagcaccgcggcatcagctacctggacgacgccagcgacgacggcaacagcagcgtgggcgactacgcccagatcgtgaaggagaacagcaagcagctggagaccaagacccccggccagatccagctggagcgctaccagacctacggccagctgcgcggcgacttcaccgtggagaaggacggcaagaagcaccgcctgatcaacgtgttccccaccagcgcctaccgcagcgaggccctgcgcatcctgcagacccagcaggagttcaacccccagatcaccgacgagttcatcaaccgctacctggagatcctgaccggcaagcgcaagtactaccacggccccggcaacgagaagagccgcaccgactacggccgctaccgcaccagcggcgagaccctggacaacatcttcggcatcctgatcggcaagtgcaccttctaccccgacgagttccgcgccgccaaggccagctacaccgcccaggagttcaacctgctgaacgacctgaacaacctgaccgtgcccaccgagaccaagaagctgagcaaggagcagaagaaccagatcatcaactacgtgaagaacgagaaggccatgggccccgccaagctgttcaagtacatcgccaagctgctgagctgcgacgtggccgacatcaagggctaccgcatcgacaagagcggcaaggccgagatccacaccttcgaggcctaccgcaagatgaagaccctggagaccctggacatcgagcagatggaccgcgagaccctggacaagctggcctacgtgctgaccctgaacaccgagcgcgagggcatccaggaggccctggagcacgagttcgccgacggcagcttcagccagaagcaggtggacgagctggtgcagttccgcaaggccaacagcagcatcttcggcaagggctggcacaacttcagcgtgaagctgatgatggagctgatccccgagctgtacgagaccagcgaggagcagatgaccatcctgacccgcctgggcaagcagaagaccaccagcagcagcaacaagaccaagtacatcgacgagaagctgctgaccgaggagatctacaaccccgtggtggccaagagcgtgcgccaggccatcaagatcgtgaacgccgccatcaaggagtacggcgacttcgacaacatcgtgatcgagatggcccgcgagaccaacgaggacgacgagaagaaggccatccagaagatccagaaggccaacaaggacgagaaggacgccgccatgctgaaggccgccaaccagtacaacggcaaggccgagctgccccacagcgtgttccacggccacaagcagctggccaccaagatccgcctgtggcaccagcagggcgagcgctgcctgtacaccggcaagaccatcagcatccacgacctgatcaacaacagcaaccagttcgaggtggctgccatcctgcccctgagcatcaccttcgacgacagcctggccaacaaggtgctggtgtacgccaccgccgctcaggagaagggccagcgcaccccctaccaggccctggacagcatggacgacgcctggagcttccgcgagctgaaggccttcgtgcgcgagagcaagaccctgagcaacaagaagaaggagtacctgctgaccgaggaggacatcagcaagttcgacgtgcgcaagaagttcatcgagcgcaacctggtggacacccgctacgccagccgcgtggtgctgaacgccctgcaggagcacttccgcgcccacaagatcgacaccaaggtgagcgtggtgcgcggccagttcaccagccagctgcgccgccactggggcatcgagaagacccgcgacacctaccaccaccacgccgtggacgccctgatcattgcggcttctagccagctgaacctgtggaagaagcagaagaacaccctggtgagctacagcgaggaccagctgctggacatcgagaccggcgagctgatcagcgacgacgagtacaaggagagcgtgttcaaggccccctaccagcacttcgtggacaccctgaagagcaaggagttcgaggacagcatcctgttcagctaccaggtggacagcaagttcaaccgcaagatcagcgacgccaccatctacgccacccgccaggccaaggtgggcaaggacaaggccgacgagacctacgtgctgggcaagatcaaggacatctacacccaggacggctacgacgccttcatgaagatctacaagaaggacaagagcaagttcctgatgtaccgccacgacccccagaccttcgagaaggtgatcgagcccatcctggagaactaccccaacaagcagatcaacgataaaggcaaggaggtgccctgcaaccccttcctgaagtacaaggaggagcacggctacatccgcaagtacagcaagaagggcaacggccccgagatcaagagcctgaagtactacgacagcaagctgggcaaccacatcgacatcacccccaaggacagcaacaacaaggtggtgctgcagagcgtgagcccctggcgcgccgacgtgtacttcaacaagaccaccggcaagtacgagatcctgggcctgaagtacgccgacctgcagtttgataagggcaccggcacctacaagatcagccaggagaagtacaacgacatcaagaagaaggagggcgtggacagcgacagcgagttcaagttcaccctgtacaagaacgaccttctgctggtgaaggacaccgagaccaaggagcaacagctgttccgcttcctgagccgcaccatgcccaagcagaagcactacgtggagctgaagccctacgacaagcagaagttcgagggcggcgaggccctgatcaaggtgctgggcaacgtggccaacagcggccagtgcaagaagggcctgggcaagagcaacatcagcatctacaaggtgcgcaccgacgtgctgggcaaccagcacatcatcaagaacgagggcgacaagcccaagctggacttcagcagggctgaccccaagaagaagaggaaggtggaggccagcggttccggacgggctgacgcattggacgattttgatctggatatgctgggaagtgacgccctcgatgattttgaccttgacatgcttggttcggatgcccttgatgactttgacctcgacatgctcggcagtgacgcccttgatgatttcgacctggacatgctgattaactctagatga

SEQ ID NO: 15 - DNA, 3606 bp, Streptococcus thermophilus
  source 1..3606: mol_type = genomic DNA
atgcccaagaagaagaggaaggtgagcgacctggtgctgggcctggccatcggcatcggcagcgtgggcgtgggcatcctgaacaaggtgaccggcgagatcatccacaagaacagtcgcatcttccctgctgctcaggctgagaacaacctggtgcgccgcaccaaccgccagggtcgccggcttgctcgccgcaagaagcaccggcgcgtgcgcctgaaccgcctgttcgaggagagcggcctgatcaccgacttcaccaagatcagcatcaacctgaacccctaccagctgcgcgtgaagggcctgaccgacgagctgagcaacgaggagctgttcatcgccctgaagaacatggtgaagcaccgcggcatcagctacctggacgacgccagcgacgacggcaacagcagcgtgggcgactacgcccagatcgtgaaggagaacagcaagcagctggagaccaagacccccggccagatccagctggagcgctaccagacctacggccagctgcgcggcgacttcaccgtggagaaggacggcaagaagcaccgcctgatcaacgtgttccccaccagcgcctaccgcagcgaggccctgcgcatcctgcagacccagcaggagttcaacccccagatcaccgacgagttcatcaaccgctacctggagatcctgaccggcaagcgcaagtactaccacggccccggcaacgagaagagccgcaccgactacggccgctaccgcaccagcggcgagaccctggacaacatcttcggcatcctgatcggcaagtgcaccttctaccccgacgagttccgcgccgccaaggccagctacaccgcccaggagttcaacctgctgaacgacctgaacaacctgaccgtgcccaccgagaccaagaagctgagcaaggagcagaagaaccagatcatcaactacgtgaagaacgagaaggccatgggccccgccaagctgttcaagtacatcgccaagctgctgagctgcgacgtggccgacatcaagggctaccgcatcgacaagagcggcaaggccgagatccacaccttcgaggcctaccgcaagatgaagaccctggagaccctggacatcgagcagatggaccgcgagaccctggacaagctggcctacgtgctgaccctgaacaccgagcgcgagggcatccaggaggccctggagcacgagttcgccgacggcagcttcagccagaagcaggtggacgagctggtgcagttccgcaaggccaacagcagcatcttcggcaagggctggcacaacttcagcgtgaagctgatgatggagctgatccccgagctgtacgagaccagcgaggagcagatgaccatcctgacccgcctgggcaagcagaagaccaccagcagcagcaacaagaccaagtacatcgacgagaagctgctgaccgaggagatctacaaccccgtggtggccaagagcgtgcgccaggccatcaagatcgtgaacgccgccatcaaggagtacggcgacttcgacaacatcgtgatcgagatggcccgcgagaccaacgaggacgacgagaagaaggccatccagaagatccagaaggccaacaaggacgagaaggacgccgccatgctgaaggccgccaaccagtacaacggcaaggccgagctgccccacagcgtgttccacggccacaagcagctggccaccaagatccgcctgtggcaccagcagggcgagcgctgcctgtacaccggcaagaccatcagcatccacgacctgatcaacaacagcaaccagttcgaggtggctgccatcctgcccctgagcatcaccttcgacgacagcctggccaacaaggtgctggtgtacgccaccgccgctcaggagaagggccagcgcaccccctaccaggccctggacagcatggacgacgcctggagcttccgcgagctgaaggccttcgtgcgcgagagcaagaccctgagcaacaagaagaaggagtacctgctgaccgaggaggacatcagcaagttcgacgtgcgcaagaagttcatcgagcgcaacctggtggacacccgctacgccagccgcgtggtgctgaacgccctgcaggagcacttccgcgcccacaagatcgacaccaaggtgagcgtggtgcgcggccagttcaccagccagctgcgccgccactggggcatcgagaagacccgcgacacctaccaccaccacgccgtggacgccctgatcattgcggcttctagccagctgaacctgtggaagaagcagaagaacaccctggtgagctacagcgaggaccagctgctggacatcgagaccggcgagctgatcagcgacgacgagtacaaggagagcgtgttcaaggccccctaccagcacttcgtggacaccctgaagagcaaggagttcgaggacagcatcctgttcagctaccaggtggacagcaagttcaaccgcaagatcagcgacgccaccatctacgccacccgccaggccaaggtgggcaaggacaaggccgacgagacctacgtgctgggcaagatcaaggacatctacacccaggacggctacgacgccttcatgaagatctacaagaaggacaagagcaagttcctgatgtaccgccacgacccccagaccttcgagaaggtgatcgagcccatcctggagaactaccccaacaagcagatcaacgataaaggcaaggaggtgccctgcaaccccttcctgaagtacaaggaggagcacggctacatccgcaagtacagcaagaagggcaacggccccgagatcaagagcctgaagtactacgacagcaagctgggcaaccacatcgacatcacccccaaggacagcaacaacaaggtggtgctgcagagcgtgagcccctggcgcgccgacgtgtacttcaacaagaccaccggcaagtacgagatcctgggcctgaagtacgccgacctgcagtttgataagggcaccggcacctacaagatcagccaggagaagtacaacgacatcaagaagaaggagggcgtggacagcgacagcgagttcaagttcaccctgtacaagaacgaccttctgctggtgaaggacaccgagaccaaggagcaacagctgttccgcttcctgagccgcaccatgcccaagcagaagcactacgtggagctgaagccctacgacaagcagaagttcgagggcggcgaggccctgatcaaggtgctgggcaacgtggccaacagcggccagtgcaagaagggcctgggcaagagcaacatcagcatctacaaggtgcgcaccgacgtgctgggcaaccagcacatcatcaagaacgagggcgacaagcccaagctggacttcagcagggctgaccccaagaagaagaggaaggtggaggccagcggttccggacgggctgacgcattggacgattttgatctggatatgctgggaagtgacgccctcgatgattttgaccttgacatgcttggttcggatgcccttgatgactttgacctcgacatgctcggcagtgacgcccttgatgatttcgacctggacatgctgattaactctagatga

SEQ ID NO: 16 - DNA, 3249 bp, Neisseria meningitidis
  source 1..3249: mol_type = genomic DNA
atggccgccttcaagcccaaccccatcaactacatcctgggcctggacatcggcatcgccagcgtgggctgggccatggtggagatcgacgaggacgagaaccccatctgcctgatcgacctgggtgtgcgcgtgttcgagcgcgctgaggtgcccaagactggtgacagtctggctatggctcgccggcttgctcgctctgttcggcgccttactcgccggcgcgctcaccgccttctgcgcgctcgccgcctgctgaagcgcgagggtgtgctgcaggctgccgacttcgacgagaacggcctgatcaagagcctgcccaacactccttggcagctgcgcgctgccgctctggaccgcaagctgactcctctggagtggagcgccgtgctgctgcacctgatcaagcaccgcggctacctgagccagcgcaagaacgagggcgagaccgccgacaaggagctgggtgctctgctgaagggcgtggccgacaacgcccacgccctgcagactggtgacttccgcactcctgctgagctggccctgaacaagttcgagaaggagagcggccacatccgcaaccagcgcggcgactacagccacaccttcagccgcaaggacctgcaggccgagctgatcctgctgttcgagaagcagaaggagttcggcaacccccacgtgagcggcggcctgaaggagggcatcgagaccctgctgatgacccagcgccccgccctgagcggcgacgccgtgcagaagatgctgggccactgcaccttcgagccagccgagcccaaggccgccaagaacacctacaccgccgagcgcttcatctggctgaccaagctgaacaacctgcgcatcctggagcagggcagcgagcgccccctgaccgacaccgagcgcgccaccctgatggacgagccctaccgcaagagcaagctgacctacgcccaggcccgcaagctgctgggtctggaggacaccgccttcttcaagggcctgcgctacggcaaggacaacgccgaggccagcaccctgatggagatgaaggcctaccacgccatcagccgcgccctggagaaggagggcctgaaggacaagaagagtcctctgaacctgagccccgagctgcaggacgagatcggcaccgccttcagcctgttcaagaccgacgaggacatcaccggccgcctgaaggaccgcatccagcccgagatcctggaggccctgctgaagcacatcagcttcgacaagttcgtgcagatcagcctgaaggccctgcgccgcatcgtgcccctgatggagcagggcaagcgctacgacgaggcctgcgccgagatctacggcgaccactacggcaagaagaacaccgaggagaagatctacctgcctcctatccccgccgacgagatccgcaaccccgtggtgctgcgcgccctgagccaggcccgcaaggtgatcaacggcgtggtgcgccgctacggcagccccgcccgcatccacatcgagaccgcccgcgaggtgggcaagagcttcaaggaccgcaaggagatcgagaagcgccaggaggagaaccgcaaggaccgcgagaaggccgccgccaagttccgcgagtacttccccaacttcgtgggcgagcccaagagcaaggacatcctgaagctgcgcctgtacgagcagcagcacggcaagtgcctgtacagcggcaaggagatcaacctgggccgcctgaacgagaagggctacgtggagatcgaccacgccctgcccttcagccgcacctgggacgacagcttcaacaacaaggtgctggtgctgggcagcgagaaccagaacaagggcaaccagaccccctacgagtacttcaacggcaaggacaacagccgcgagtggcaggagttcaaggcccgcgtggagaccagccgcttcccccgcagcaagaagcagcgcatcctgctgcagaagttcgacgaggacggcttcaaggagcgcaacctgaacgacacccgctacgtgaaccgcttcctgtgccagttcgtggccgaccgcatgcgcctgaccggcaagggcaagaagcgcgtgttcgccagcaacggccagatcaccaacctgctgcgcggcttctggggcctgcgcaaggtgcgcgccgagaacgaccgccaccacgccctggacgccgtggtggtggcctgcagcaccgtggccatgcagcagaagatcacccgcttcgtgcgctacaaggagatgaacgccttcgacggtaaaaccatcgacaaggagaccggcgaggtgctgcaccagaagacccacttcccccagccctgggagttcttcgcccaggaggtgatgatccgcgtgttcggcaagcccgacggcaagcccgagttcgaggaggccgacacccccgagaagctgcgcaccctgctggccgagaagctgagcagccgccctgaggccgtgcacgagtacgtgactcctctgttcgtgagccgcgcccccaaccgcaagatgagcggtcagggtcacatggagaccgtgaagagcgccaagcgcctggacgagggcgtgagcgtgctgcgcgtgcccctgacccagctgaagctgaaggacctggagaagatggtgaaccgcgagcgcgagcccaagctgtacgaggccctgaaggcccgcctggaggcccacaaggacgaccccgccaaggccttcgccgagcccttctacaagtacgacaaggccggcaaccgcacccagcaggtgaaggccgtgcgcgtggagcaggtgcagaagaccggcgtgtgggtgcgcaaccacaacggcatcgccgacaacgccaccatggtgcgcgtggacgtgttcgagaagggcgacaagtactacctggtgcccatctacagctggcaggtggccaagggcatcctgcccgaccgcgccgtggtgcagggcaaggacgaggaggactggcagctgatcgacgacagcttcaacttcaagttcagcctgcaccccaacgacctggtggaggtgatcaccaagaaggcccgcatgttcggctacttcgccagctgccaccgcggcaccggcaacatcaacatccgcatccacgacctggaccacaagatcggcaagaacggcatcctggagggcatcggcgtgaagaccgccctgagcttccagaagtaccagatcgacgagctgggcaaggagatccgcccctgccgcctgaagaagcgccctcctgtgcgctaa

SEQ ID NO: 17 - DNA, 3249 bp, Neisseria meningitidis
  source 1..3249: mol_type = genomic DNA
atggccgccttcaagcccaaccccatcaactacatcctgggcctggccatcggcatcgccagcgtgggctgggccatggtggagatcgacgaggacgagaaccccatctgcctgatcgacctgggtgtgcgcgtgttcgagcgcgctgaggtgcccaagactggtgacagtctggctatggctcgccggcttgctcgctctgttcggcgccttactcgccggcgcgctcaccgccttctgcgcgctcgccgcctgctgaagcgcgagggtgtgctgcaggctgccgacttcgacgagaacggcctgatcaagagcctgcccaacactccttggcagctgcgcgctgccgctctggaccgcaagctgactcctctggagtggagcgccgtgctgctgcacctgatcaagcaccgcggctacctgagccagcgcaagaacgagggcgagaccgccgacaaggagctgggtgctctgctgaagggcgtggccgacaacgcccacgccctgcagactggtgacttccgcactcctgctgagctggccctgaacaagttcgagaaggagagcggccacatccgcaaccagcgcggcgactacagccacaccttcagccgcaaggacctgcaggccgagctgatcctgctgttcgagaagcagaaggagttcggcaacccccacgtgagcggcggcctgaaggagggcatcgagaccctgctgatgacccagcgccccgccctgagcggcgacgccgtgcagaagatgctgggccactgcaccttcgagccagccgagcccaaggccgccaagaacacctacaccgccgagcgcttcatctggctgaccaagctgaacaacctgcgcatcctggagcagggcagcgagcgccccctgaccgacaccgagcgcgccaccctgatggacgagccctaccgcaagagcaagctgacctacgcccaggcccgcaagctgctgggtctggaggacaccgccttcttcaagggcctgcgctacggcaaggacaacgccgaggccagcaccctgatggagatgaaggcctaccacgccatcagccgcgccctggagaaggagggcctgaaggacaagaagagtcctctgaacctgagccccgagctgcaggacgagatcggcaccgccttcagcctgttcaagaccgacgaggacatcaccggccgcctgaaggaccgcatccagcccgagatcctggaggccctgctgaagcacatcagcttcgacaagttcgtgcagatcagcctgaaggccctgcgccgcatcgtgcccctgatggagcagggcaagcgctacgacgaggcctgcgccgagatctacggcgaccactacggcaagaagaacaccgaggagaagatctacctgcctcctatccccgccgacgagatccgcaaccccgtggtgctgcgcgccctgagccaggcccgcaaggtgatcaacggcgtggtgcgccgctacggcagccccgcccgcatccacatcgagaccgcccgcgaggtgggcaagagcttcaaggaccgcaaggagatcgagaagcgccaggaggagaaccgcaaggaccgcgagaaggccgccgccaagttccgcgagtacttccccaacttcgtgggcgagcccaagagcaaggacatcctgaagctgcgcctgtacgagcagcagcacggcaagtgcctgtacagcggcaaggagatcaacctgggccgcctgaacgagaagggctacgtggagatcgccgctgccctgcccttcagccgcacctgggacgacagcttcaacaacaaggtgctggtgctgggcagcgaggctcagaacaagggcaaccagaccccctacgagtacttcaacggcaaggacaacagccgcgagtggcaggagttcaaggcccgcgtggagaccagccgcttcccccgcagcaagaagcagcgcatcctgctgcagaagttcgacgaggacggcttcaaggagcgcaacctgaacgacacccgctacgtgaaccgcttcctgtgccagttcgtggccgaccgcatgcgcctgaccggcaagggcaagaagcgcgtgttcgccagcaacggccagatcaccaacctgctgcgcggcttctggggcctgcgcaaggtgcgcgccgagaacgaccgccaccacgccctggacgccgtggtggtggcctgcagcaccgtggccatgcagcagaagatcacccgcttcgtgcgctacaaggagatgaacgccttcgacggtaaaaccatcgacaaggagaccggcgaggtgctgcaccagaagacccacttcccccagccctgggagttcttcgcccaggaggtgatgatccgcgtgttcggcaagcccgacggcaagcccgagttcgaggaggccgacacccccgagaagctgcgcaccctgctggccgagaagctgagcagccgccctgaggccgtgcacgagtacgtgactcctctgttcgtgagccgcgcccccaaccgcaagatgagcggtcagggtcacatggagaccgtgaagagcgccaagcgcctggacgagggcgtgagcgtgctgcgcgtgcccctgacccagctgaagctgaaggacctggagaagatggtgaaccgcgagcgcgagcccaagctgtacgaggccctgaaggcccgcctggaggcccacaaggacgaccccgccaaggccttcgccgagcccttctacaagtacgacaaggccggcaaccgcacccagcaggtgaaggccgtgcgcgtggagcaggtgcagaagaccggcgtgtgggtgcgcaaccacaacggcatcgccgacaacgccaccatggtgcgcgtggacgtgttcgagaagggcgacaagtactacctggtgcccatctacagctggcaggtggccaagggcatcctgcccgaccgcgccgtggtgcagggcaaggacgaggaggactggcagctgatcgacgacagcttcaacttcaagttcagcctgcaccccaacgacctggtggaggtgatcaccaagaaggcccgcatgttcggctacttcgccagctgccaccgcggcaccggcaacatcaacatccgcatccacgacctggaccacaagatcggcaagaacggcatcctggagggcatcggcgtgaagaccgccctgagcttccagaagtaccagatcgacgagctgggcaaggagatccgcccctgccgcctgaagaagcgccctcctgtgcgctaa

SEQ ID NO: 18 - DNA, 3282 bp, Neisseria meningitidis
  source 1..3282: mol_type = genomic DNA
atggccgccttcaagcccaaccccatcaactacatcctgggcctggacatcggcatcgccagcgtgggctgggccatggtggagatcgacgaggacgagaaccccatctgcctgatcgacctgggtgtgcgcgtgttcgagcgcgctgaggtgcccaagactggtgacagtctggctatggctcgccggcttgctcgctctgttcggcgccttactcgccggcgcgctcaccgccttctgcgcgctcgccgcctgctgaagcgcgagggtgtgctgcaggctgccgacttcgacgagaacggcctgatcaagagcctgcccaacactccttggcagctgcgcgctgccgctctggaccgcaagctgactcctctggagtggagcgccgtgctgctgcacctgatcaagcaccgcggctacctgagccagcgcaagaacgagggcgagaccgccgacaaggagctgggtgctctgctgaagggcgtggccgacaacgcccacgccctgcagactggtgacttccgcactcctgctgagctggccctgaacaagttcgagaaggagagcggccacatccgcaaccagcgcggcgactacagccacaccttcagccgcaaggacctgcaggccgagctgatcctgctgttcgagaagcagaaggagttcggcaacccccacgtgagcggcggcctgaaggagggcatcgagaccctgctgatgacccagcgccccgccctgagcggcgacgccgtgcagaagatgctgggccactgcaccttcgagccagccgagcccaaggccgccaagaacacctacaccgccgagcgcttcatctggctgaccaagctgaacaacctgcgcatcctggagcagggcagcgagcgccccctgaccgacaccgagcgcgccaccctgatggacgagccctaccgcaagagcaagctgacctacgcccaggcccgcaagctgctgggtctggaggacaccgccttcttcaagggcctgcgctacggcaaggacaacgccgaggccagcaccctgatggagatgaaggcctaccacgccatcagccgcgccctggagaaggagggcctgaaggacaagaagagtcctctgaacctgagccccgagctgcaggacgagatcggcaccgccttcagcctgttcaagaccgacgaggacatcaccggccgcctgaaggaccgcatccagcccgagatcctggaggccctgctgaagcacatcagcttcgacaagttcgtgcagatcagcctgaaggccctgcgccgcatcgtgcccctgatggagcagggcaagcgctacgacgaggcctgcgccgagatctacggcgaccactacggcaagaagaacaccgaggagaagatctacctgcctcctatccccgccgacgagatccgcaaccccgtggtgctgcgcgccctgagccaggcccgcaaggtgatcaacggcgtggtgcgccgctacggcagccccgcccgcatccacatcgagaccgcccgcgaggtgggcaagagcttcaaggaccgcaaggagatcgagaagcgccaggaggagaaccgcaaggaccgcgagaaggccgccgccaagttccgcgagtacttccccaacttcgtgggcgagcccaagagcaaggacatcctgaagctgcgcctgtacgagcagcagcacggcaagtgcctgtacagcggcaaggagatcaacctgggccgcctgaacgagaagggctacgtggagatcgaccacgccctgcccttcagccgcacctgggacgacagcttcaacaacaaggtgctggtgctgggcagcgagaaccagaacaagggcaaccagaccccctacgagtacttcaacggcaaggacaacagccgcgagtggcaggagttcaaggcccgcgtggagaccagccgcttcccccgcagcaagaagcagcgcatcctgctgcagaagttcgacgaggacggcttcaaggagcgcaacctgaacgacacccgctacgtgaaccgcttcctgtgccagttcgtggccgaccgcatgcgcctgaccggcaagggcaagaagcgcgtgttcgccagcaacggccagatcaccaacctgctgcgcggcttctggggcctgcgcaaggtgcgcgccgagaacgaccgccaccacgccctggacgccgtggtggtggcctgcagcaccgtggccatgcagcagaagatcacccgcttcgtgcgctacaaggagatgaacgccttcgacggtaaaaccatcgacaaggagaccggcgaggtgctgcaccagaagacccacttcccccagccctgggagttcttcgcccaggaggtgatgatccgcgtgttcggcaagcccgacggcaagcccgagttcgaggaggccgacacccccgagaagctgcgcaccctgctggccgagaagctgagcagccgccctgaggccgtgcacgagtacgtgactcctctgttcgtgagccgcgcccccaaccgcaagatgagcggtcagggtcacatggagaccgtgaagagcgccaagcgcctggacgagggcgtgagcgtgctgcgcgtgcccctgacccagctgaagctgaaggacctggagaagatggtgaaccgcgagcgcgagcccaagctgtacgaggccctgaaggcccgcctggaggcccacaaggacgaccccgccaaggccttcgccgagcccttctacaagtacgacaaggccggcaaccgcacccagcaggtgaaggccgtgcgcgtggagcaggtgcagaagaccggcgtgtgggtgcgcaaccacaacggcatcgccgacaacgccaccatggtgcgcgtggacgtgttcgagaagggcgacaagtactacctggtgcccatctacagctggcaggtggccaagggcatcctgcccgaccgcgccgtggtgcagggcaaggacgaggaggactggcagctgatcgacgacagcttcaacttcaagttcagcctgcaccccaacgacctggtggaggtgatcaccaagaaggcccgcatgttcggctacttcgccagctgccaccgcggcaccggcaacatcaacatccgcatccacgacctggaccacaagatcggcaagaacggcatcctggagggcatcggcgtgaagaccgccctgagcttccagaagtaccagatcgacgagctgggcaaggagatccgcccctgccgcctgaagaagcgccctcctgtgcgcagcagggctgaccccaagaagaagaggaaggtgtga

SEQ ID NO: 19 - DNA, 3342 bp, Neisseria meningitidis
  source 1..3342: mol_type = genomic DNA
atggccgccttcaagcccaaccccatcaactacatcctgggcctggacatcggcatcgccagcgtgggctgggccatggtggagatcgacgaggacgagaaccccatctgcctgatcgacctgggtgtgcgcgtgttcgagcgcgctgaggtgcccaagactggtgacagtctggctatggctcgccggcttgctcgctctgttcggcgccttactcgccggcgcgctcaccgccttctgcgcgctcgccgcctgctgaagcgcgagggtgtgctgcaggctgccgacttcgacgagaacggcctgatcaagagcctgcccaacactccttggcagctgcgcgctgccgctctggaccgcaagctgactcctctggagtggagcgccgtgctgctgcacctgatcaagcaccgcggctacctgagccagcgcaagaacgagggcgagaccgccgacaaggagctgggtgctctgctgaagggcgtggccgacaacgcccacgccctgcagactggtgacttccgcactcctgctgagctggccctgaacaagttcgagaaggagagcggccacatccgcaaccagcgcggcgactacagccacaccttcagccgcaaggacctgcaggccgagctgatcctgctgttcgagaagcagaaggagttcggcaacccccacgtgagcggcggcctgaaggagggcatcgagaccctgctgatgacccagcgccccgccctgagcggcgacgccgtgcagaagatgctgggccactgcaccttcgagccagccgagcccaaggccgccaagaacacctacaccgccgagcgcttcatctggctgaccaagctgaacaacctgcgcatcctggagcagggcagcgagcgccccctgaccgacaccgagcgcgccaccctgatggacgagccctaccgcaagagcaagctgacctacgcccaggcccgcaagctgctgggtctggaggacaccgccttcttcaagggcctgcgctacggcaaggacaacgccgaggccagcaccctgatggagatgaaggcctaccacgccatcagccgcgccctggagaaggagggcctgaaggacaagaagagtcctctgaacctgagccccgagctgcaggacgagatcggcaccgccttcagcctgttcaagaccgacgaggacatcaccggccgcctgaaggaccgcatccagcccgagatcctggaggccctgctgaagcacatcagcttcgacaagttcgtgcagatcagcctgaaggccctgcgccgcatcgtgcccctgatggagcagggcaagcgctacgacgaggcctgcgccgagatctacggcgaccactacggcaagaagaacaccgaggagaagatctacctgcctcctatccccgccgacgagatccgcaaccccgtggtgctgcgcgccctgagccaggcccgcaaggtgatcaacggcgtggtgcgccgctacggcagccccgcccgcatccacatcgagaccgcccgcgaggtgggcaagagcttcaaggaccgcaaggagatcgagaagcgccaggaggagaaccgcaaggaccgcgagaaggccgccgccaagttccgcgagtacttccccaacttcgtgggcgagcccaagagcaaggacatcctgaagctgcgcctgtacgagcagcagcacggcaagtgcctgtacagcggcaaggagatcaacctgggccgcctgaacgagaagggctacgtggagatcgaccacgccctgcccttcagccgcacctgggacgacagcttcaacaacaaggtgctggtgctgggcagcgagaaccagaacaagggcaaccagaccccctacgagtacttcaacggcaaggacaacagccgcgagtggcaggagttcaaggcccgcgtggagaccagccgcttcccccgcagcaagaagcagcgcatcctgctgcagaagttcgacgaggacggcttcaaggagcgcaacctgaacgacacccgctacgtgaaccgcttcctgtgccagttcgtggccgaccgcatgcgcctgaccggcaagggcaagaagcgcgtgttcgccagcaacggccagatcaccaacctgctgcgcggcttctggggcctgcgcaaggtgcgcgccgagaacgaccgccaccacgccctggacgccgtggtggtggcctgcagcaccgtggccatgcagcagaagatcacccgcttcgtgcgctacaaggagatgaacgccttcgacggtaaaaccatcgacaaggagaccggcgaggtgctgcaccagaagacccacttcccccagccctgggagttcttcgcccaggaggtgatgatccgcgtgttcggcaagcccgacggcaagcccgagttcgaggaggccgacacccccgagaagctgcgcaccctgctggccgagaagctgagcagccgccctgaggccgtgcacgagtacgtgactcctctgttcgtgagccgcgcccccaaccgcaagatgagcggtcagggtcacatggagaccgtgaagagcgccaagcgcctggacgagggcgtgagcgtgctgcgcgtgcccctgacccagctgaagctgaaggacctggagaagatggtgaaccgcgagcgcgagcccaagctgtacgaggccctgaaggcccgcctggaggcccacaaggacgaccccgccaaggccttcgccgagcccttctacaagtacgacaaggccggcaaccgcacccagcaggtgaaggccgtgcgcgtggagcaggtgcagaagaccggcgtgtgggtgcgcaaccacaacggcatcgccgacaacgccaccatggtgcgcgtggacgtgttcgagaagggcgacaagtactacctggtgcccatctacagctggcaggtggccaagggcatcctgcccgaccgcgccgtggtgcagggcaaggacgaggaggactggcagctgatcgacgacagcttcaacttcaagttcagcctgcaccccaacgacctggtggaggtgatcaccaagaaggcccgcatgttcggctacttcgccagctgccaccgcggcaccggcaacatcaacatccgcatccacgacctggaccacaagatcggcaagaacggcatcctggagggcatcggcgtgaagaccgccctgagcttccagaagtaccagatcgacgagctgggcaaggagatccgcccctgccgcctgaagaagcgccctcctgtgcgcgcggccgcagatccaaaaaagaagagaaaggtagatccaaaaaagaagagaaaggtagatccaaaaaagaagagaaaggtagatacggccgcatag

SEQ ID NO: 20 - DNA, 3468 bp, Neisseria meningitidis
  source 1..3468: mol_type = genomic DNA
atggccgccttcaagcccaaccccatcaactacatcctgggcctggccatcggcatcgccagcgtgggctgggccatggtggagatcgacgaggacgagaaccccatctgcctgatcgacctgggtgtgcgcgtgttcgagcgcgctgaggtgcccaagactggtgacagtctggctatggctcgccggcttgctcgctctgttcggcgccttactcgccggcgcgctcaccgccttctgcgcgctcgccgcctgctgaagcgcgagggtgtgctgcaggctgccgacttcgacgagaacggcctgatcaagagcctgcccaacactccttggcagctgcgcgctgccgctctggaccgcaagctgactcctctggagtggagcgccgtgctgctgcacctgatcaagcaccgcggctacctgagccagcgcaagaacgagggcgagaccgccgacaaggagctgggtgctctgctgaagggcgtggccgacaacgcccacgccctgcagactggtgacttccgcactcctgctgagctggccctgaacaagttcgagaaggagagcggccacatccgcaaccagcgcggcgactacagccacaccttcagccgcaaggacctgcaggccgagctgatcctgctgttcgagaagcagaaggagttcggcaacccccacgtgagcggcggcctgaaggagggcatcgagaccctgctgatgacccagcgccccgccctgagcggcgacgccgtgcagaagatgctgggccactgcaccttcgagccagccgagcccaaggccgccaagaacacctacaccgccgagcgcttcatctggctgaccaagctgaacaacctgcgcatcctggagcagggcagcgagcgccccctgaccgacaccgagcgcgccaccctgatggacgagccctaccgcaagagcaagctgacctacgcccaggcccgcaagctgctgggtctggaggacaccgccttcttcaagggcctgcgctacggcaaggacaacgccgaggccagcaccctgatggagatgaaggcctaccacgccatcagccgcgccctggagaaggagggcctgaaggacaagaagagtcctctgaacctgagccccgagctgcaggacgagatcggcaccgccttcagcctgttcaagaccgacgaggacatcaccggccgcctgaaggaccgcatccagcccgagatcctggaggccctgctgaagcacatcagcttcgacaagttcgtgcagatcagcctgaaggccctgcgccgcatcgtgcccctgatggagcagggcaagcgctacgacgaggcctgcgccgagatctacggcgaccactacggcaagaagaacaccgaggagaagatctacctgcctcctatccccgccgacgagatccgcaaccccgtggtgctgcgcgccctgagccaggcccgcaaggtgatcaacggcgtggtgcgccgctacggcagccccgcccgcatccacatcgagaccgcccgcgaggtgggcaagagcttcaaggaccgcaaggagatcgagaagcgccaggaggagaaccgcaaggaccgcgagaaggccgccgccaagttccgcgagtacttccccaacttcgtgggcgagcccaagagcaaggacatcctgaagctgcgcctgtacgagcagcagcacggcaagtgcctgtacagcggcaaggagatcaacctgggccgcctgaacgagaagggctacgtggagatcgccgctgccctgcccttcagccgcacctgggacgacagcttcaacaacaaggtgctggtgctgggcagcgaggctcagaacaagggcaaccagaccccctacgagtacttcaacggcaaggacaacagccgcgagtggcaggagttcaaggcccgcgtggagaccagccgcttcccccgcagcaagaagcagcgcatcctgctgcagaagttcgacgaggacggcttcaaggagcgcaacctgaacgacacccgctacgtgaaccgcttcctgtgccagttcgtggccgaccgcatgcgcctgaccggcaagggcaagaagcgcgtgttcgccagcaacggccagatcaccaacctgctgcgcggcttctggggcctgcgcaaggtgcgcgccgagaacgaccgccaccacgccctggacgccgtggtggtggcctgcagcaccgtggccatgcagcagaagatcacccgcttcgtgcgctacaaggagatgaacgccttcgacggtaaaaccatcgacaaggagaccggcgaggtgctgcaccagaagacccacttcccccagccctgggagttcttcgcccaggaggtgatgatccgcgtgttcggcaagcccgacggcaagcccgagttcgaggaggccgacacccccgagaagctgcgcaccctgctggccgagaagctgagcagccgccctgaggccgtgcacgagtacgtgactcctctgttcgtgagccgcgcccccaaccgcaagatgagcggtcagggtcacatggagaccgtgaagagcgccaagcgcctggacgagggcgtgagcgtgctgcgcgtgcccctgacccagctgaagctgaaggacctggagaagatggtgaaccgcgagcgcgagcccaagctgtacgaggccctgaaggcccgcctggaggcccacaaggacgaccccgccaaggccttcgccgagcccttctacaagtacgacaaggccggcaaccgcacccagcaggtgaaggccgtgcgcgtggagcaggtgcagaagaccggcgtgtgggtgcgcaaccacaacggcatcgccgacaacgccaccatggtgcgcgtggacgtgttcgagaagggcgacaagtactacctggtgcccatctacagctggcaggtggccaagggcatcctgcccgaccgcgccgtggtgcagggcaaggacgaggaggactggcagctgatcgacgacagcttcaacttcaagttcagcctgcaccccaacgacctggtggaggtgatcaccaagaaggcccgcatgttcggctacttcgccagctgccaccgcggcaccggcaacatcaacatccgcatccacgacctggaccacaagatcggcaagaacggcatcctggagggcatcggcgtgaagaccgccctgagcttccagaagtaccagatcgacgagctgggcaaggagatccgcccctgccgcctgaagaagcgccctcctgtgcgcagcagggctgaccccaagaagaagaggaaggtggaggccagcggttccggacgggctgacgcattggacgattttgatctggatatgctgggaagtgacgccctcgatgattttgaccttgacatgcttggttcggatgcccttgatgactttgacctcgacatgctcggcagtgacgcccttgatgatttcgacctggacatgctgattaactctagatga

SEQ ID NO: 21 - DNA, 3489 bp, Neisseria meningitidis
  source 1..3489: mol_type = genomic DNA
atgcccaagaagaagaggaaggtggccgccttcaagcccaaccccatcaactacatcctgggcctggccatcggcatcgccagcgtgggctgggccatggtggagatcgacgaggacgagaaccccatctgcctgatcgacctgggtgtgcgcgtgttcgagcgcgctgaggtgcccaagactggtgacagtctggctatggctcgccggcttgctcgctctgttcggcgccttactcgccggcgcgctcaccgccttctgcgcgctcgccgcctgctgaagcgcgagggtgtgctgcaggctgccgacttcgacgagaacggcctgatcaagagcctgcccaacactccttggcagctgcgcgctgccgctctggaccgcaagctgactcctctggagtggagcgccgtgctgctgcacctgatcaagcaccgcggctacctgagccagcgcaagaacgagggcgagaccgccgacaaggagctgggtgctctgctgaagggcgtggccgacaacgcccacgccctgcagactggtgacttccgcactcctgctgagctggccctgaacaagttcgagaaggagagcggccacatccgcaaccagcgcggcgactacagccacaccttcagccgcaaggacctgcaggccgagctgatcctgctgttcgagaagcagaaggagttcggcaacccccacgtgagcggcggcctgaaggagggcatcgagaccctgctgatgacccagcgccccgccctgagcggcgacgccgtgcagaagatgctgggccactgcaccttcgagccagccgagcccaaggccgccaagaacacctacaccgccgagcgcttcatctggctgaccaagctgaacaacctgcgcatcctggagcagggcagcgagcgccccctgaccgacaccgagcgcgccaccctgatggacgagccctaccgcaagagcaagctgacctacgcccaggcccgcaagctgctgggtctggaggacaccgccttcttcaagggcctgcgctacggcaaggacaacgccgaggccagcaccctgatggagatgaaggcctaccacgccatcagccgcgccctggagaaggagggcctgaaggacaagaagagtcctctgaacctgagccccgagctgcaggacgagatcggcaccgccttcagcctgttcaagaccgacgaggacatcaccggccgcctgaaggaccgcatccagcccgagatcctggaggccctgctgaagcacatcagcttcgacaagttcgtgcagatcagcctgaaggccctgcgccgcatcgtgcccctgatggagcagggcaagcgctacgacgaggcctgcgccgagatctacggcgaccactacggcaagaagaacaccgaggagaagatctacctgcctcctatccccgccgacgagatccgcaaccccgtggtgctgcgcgccctgagccaggcccgcaaggtgatcaacggcgtggtgcgccgctacggcagccccgcccgcatccacatcgagaccgcccgcgaggtgggcaagagcttcaaggaccgcaaggagatcgagaagcgccaggaggagaaccgcaaggaccgcgagaaggccgccgccaagttccgcgagtacttccccaacttcgtgggcgagcccaagagcaaggacatcctgaagctgcgcctgtacgagcagcagcacggcaagtgcctgtacagcggcaaggagatcaacctgggccgcctgaacgagaagggctacgtggagatcgccgctgccctgcccttcagccgcacctgggacgacagcttcaacaacaaggtgctggtgctgggcagcgaggctcagaacaagggcaaccagaccccctacgagtacttcaacggcaaggacaacagccgcgagtggcaggagttcaaggcccgcgtggagaccagccgcttcccccgcagcaagaagcagcgcatcctgctgcagaagttcgacgaggacggcttcaaggagcgcaacctgaacgacacccgctacgtgaaccgcttcctgtgccagttcgtggccgaccgcatgcgcctgaccggcaagggcaagaagcgcgtgttcgccagcaacggccagatcaccaacctgctgcgcggcttctggggcctgcgcaaggtgcgcgccgagaacgaccgccaccacgccctggacgccgtggtggtggcctgcagcaccgtggccatgcagcagaagatcacccgcttcgtgcgctacaaggagatgaacgccttcgacggtaaaaccatcgacaaggagaccggcgaggtgctgcaccagaagacccacttcccccagccctgggagttcttcgcccaggaggtgatgatccgcgtgttcggcaagcccgacggcaagcccgagttcgaggaggccgacacccccgagaagctgcgcaccctgctggccgagaagctgagcagccgccctgaggccgtgcacgagtacgtgactcctctgttcgtgagccgcgcccccaaccgcaagatgagcggtcagggtcacatggagaccgtgaagagcgccaagcgcctggacgagggcgtgagcgtgctgcgcgtgcccctgacccagctgaagctgaaggacctggagaagatggtgaaccgcgagcgcgagcccaagctgtacgaggccctgaaggcccgcctggaggcccacaaggacgaccccgccaaggccttcgccgagcccttctacaagtacgacaaggccggcaaccgcacccagcaggtgaaggccgtgcgcgtggagcaggtgcagaagaccggcgtgtgggtgcgcaaccacaacggcatcgccgacaacgccaccatggtgcgcgtggacgtgttcgagaagggcgacaagtactacctggtgcccatctacagctggcaggtggccaagggcatcctgcccgaccgcgccgtggtgcagggcaaggacgaggaggactggcagctgatcgacgacagcttcaacttcaagttcagcctgcaccccaacgacctggtggaggtgatcaccaagaaggcccgcatgttcggctacttcgccagctgccaccgcggcaccggcaacatcaacatccgcatccacgacctggaccacaagatcggcaagaacggcatcctggagggcatcggcgtgaagaccgccctgagcttccagaagtaccagatcgacgagctgggcaaggagatccgcccctgccgcctgaagaagcgccctcctgtgcgcagcagggctgaccccaagaagaagaggaaggtggaggccagcggttccggacgggctgacgcattggacgattttgatctggatatgctgggaagtgacgccctcgatgattttgaccttgacatgcttggttcggatgcccttgatgactttgacctcgacatgctcggcagtgacgcccttgatgatttcgacctggacatgctgattaactctagatga

SEQ ID NO: 22 - DNA, 4188 bp, Treponema denticola
  source 1..4188: mol_type = genomic DNA
atgaagaaggagatcaaggactacttcctgggcctggacgtgggcaccggcagcgtgggctgggccgtgaccgacaccgactacaagctgctgaaggccaaccgcaaggacctgtggggcatgcgctgcttcgagactgctgagaccgccgaggtgcgccggctgcaccgcggtgctcgccggcgcatcgagcgccgcaagaagcgcatcaagctgctgcaggagctgttcagccaggagatcgccaagaccgacgagggcttcttccagcgcatgaaggagagccccttctacgccgaggacaagaccatcctgcaggagaacaccctgttcaacgacaaggacttcgccgacaagacctaccacaaggcctaccccaccatcaaccacctgatcaaggcctggatcgagaacaaggtgaagcccgaccctcgcctgctgtacctggcctgccacaacatcatcaagaagcgcggccacttcctgttcgagggcgacttcgacagcgagaaccagttcgacaccagcatccaggccctgttcgagtacctgcgcgaggacatggaggtggacatcgacgccgacagccagaaggtgaaggagatcctgaaggacagcagcctgaagaacagcgagaagcagagccgcctgaacaagatcctgggcctgaagcccagcgacaagcagaagaaggccatcaccaacctgatcagcggcaacaagatcaacttcgccgacctgtacgacaaccccgacctgaaggacgccgagaagaacagcatcagcttcagcaaggacgacttcgacgccctgagcgacgacctggccagcatcctgggcgacagcttcgagctgctgctgaaggccaaggccgtgtacaactgcagcgtgctgagcaaggtgatcggcgacgagcagtacctgagcttcgccaaggtgaagatctacgagaagcacaagaccgaccttaccaagctgaagaacgtgatcaagaagcacttccccaaggactacaagaaggtgttcggctacaacaagaacgagaagaacaacaacaactacagcggctacgtgggcgtgtgcaagaccaagagcaagaagctgatcatcaacaacagcgtgaaccaggaggacttctacaagttcctgaagaccatcctgagcgccaagagcgagatcaaggaggtgaacgacatcctgaccgagatcgagaccggcaccttcctgcccaagcagatcagcaagagcaacgccgagatcccctaccagctgcgcaagatggagctggagaagatcctgagcaacgccgagaagcacttcagcttcctgaagcagaaggacgagaagggcctgagccacagcgagaagatcatcatgctgctgaccttcaagatcccctactacatcggccccatcaacgacaaccacaagaagttcttccccgaccgctgctgggtggtgaagaaggagaagagccccagcggcaagaccaccccctggaacttcttcgaccacatcgacaaggagaagaccgccgaggccttcatcaccagccgcaccaacttctgcacatacctggtgggcgagagcgtgctgcccaagagcagcctgctgtacagcgagtacaccgtgctgaacgagatcaacaacctgcagatcatcatcgacggcaagaacatctgcgacatcaagctgaagcagaagatctacgaggacctgttcaagaagtacaagaagatcacccagaagcagatcagcaccttcatcaagcacgagggcatctgcaacaagaccgacgaggtgatcatcctgggcatcgacaaggagtgcaccagcagcctgaagagctacatcgagctgaagaacatcttcggcaagcaggtggacgagatcagcaccaagaacatgctggaggagatcatccgctgggccaccatctacgacgagggcgagggcaagaccatcctgaagaccaagatcaaggccgagtacggcaagtactgcagcgacgagcagatcaagaagatcctgaacctgaagttcagcggctggggccgcctgagccgcaagttcctggagaccgtgaccagcgagatgcccggcttcagcgagcccgtgaacatcatcaccgccatgcgcgagacccagaacaacctgatggagctgctgagcagcgagttcaccttcaccgagaacatcaagaagatcaacagcggcttcgaggacgccgagaagcagttcagctacgacggcctggtgaagcccctgttcctgagccccagcgtgaagaagatgctgtggcagaccctgaagctggtgaaggagatcagccacatcacccaggctcctcctaagaagatcttcatcgagatggccaagggcgccgagctggagcctgctcgcaccaagacccgcctgaagatcctgcaggacctgtacaacaactgcaagaacgacgccgacgcattcagcagcgagatcaaggacctgagcggcaagatcgagaacgaggacaacctgcgcctgcgcagcgacaagctgtacctgtactacacccagctgggcaagtgcatgtactgcggcaagcccatcgagatcggccacgtgttcgacaccagcaactacgacatcgaccacatctacccccagagcaagatcaaggacgacagcatcagcaaccgcgtgctggtgtgcagcagctgcaacaagaacaaggaggacaagtaccctctgaagagcgagatccagagcaagcagcgcggcttctggaacttcctgcagcgcaacaacttcatcagcctggagaagctgaaccgcctgacccgcgccacccccatcagcgacgacgagaccgccaagttcatcgcccgccagctggtggagactcgccaagctaccaaggtggccgccaaggtgctggagaagatgttccccgagaccaagatcgtgtacagcaaggccgagaccgtgagcatgttccgcaacaagttcgacatcgtgaagtgccgcgagatcaacgacttccaccacgcccacgacgcctacctgaacatcgtggtgggcaacgtgtacaacaccaagttcaccaacaacccctggaatttcattaaggagaagcgcgacaaccccaagatcgccgacacctacaactactacaaggtgttcgactacgacgtgaagcgcaacaacatcaccgcctgggagaagggcaagaccatcatcaccgtgaaggacatgctgaagcgcaacacccccatctacacccgccaggccgcctgcaagaagggcgagctgttcaaccagaccatcatgaagaagggcctgggccagcaccccctgaagaaggagggccccttcagcaacatcagcaagtacggcggctacaacaaggtgagcgccgcctactacaccctgatcgagtacgaggagaagggcaacaagatccgcagcctggagaccatccccctgtacctggtgaaggacatccagaaggaccaggacgtgctgaagagctacctgaccgacctgctgggcaagaaggagttcaagatcctggtgcccaagatcaagatcaacagcctgctgaagatcaacggcttcccctgccacatcaccggcaagaccaacgacagcttcctgctgcgccccgccgtgcagttctgctgcagcaacaacgaggtgctgtacttcaagaagatcatccgcttcagcgagatccgcagccagcgcgagaagatcggcaagaccatcagcccctacgaggacctgagcttccgcagctacatcaaggagaacctgtggaagaagaccaagaacgacgagatcggcgagaaggagttctacgacctgctgcagaagaagaacctggagatctacgacatgctgctgaccaagcacaaggacaccatctacaagaagcgccccaacagcgccaccatcgacatcctggtgaagggcaaggagaagttcaagagcctgatcatcgagaaccagttcgaggtgatcctggagatcctgaagctgttcagcgccacccgcaacgtgagcgacctgcagcacatcggcggcagcaagtacagcggcgtggccaagatcggcaacaagatcagcagcctggacaactgcatcctgatctaccagagcatcaccggcatcttcgagaagcgcatcgacctgctgaaggtgtaa

SEQ ID NO: 23 - DNA, 4188 bp, Treponema denticola
  source 1..4188: mol_type = genomic DNA
atgaagaaggagatcaaggactacttcctgggcctggccgtgggcaccggcagcgtgggctgggccgtgaccgacaccgactacaagctgctgaaggccaaccgcaaggacctgtggggcatgcgctgcttcgagactgctgagaccgccgaggtgcgccggctgcaccgcggtgctcgccggcgcatcgagcgccgcaagaagcgcatcaagctgctgcaggagctgttcagccaggagatcgccaagaccgacgagggcttcttccagcgcatgaaggagagccccttctacgccgaggacaagaccatcctgcaggagaacaccctgttcaacgacaaggacttcgccgacaagacctaccacaaggcctaccccaccatcaaccacctgatcaaggcctggatcgagaacaaggtgaagcccgaccctcgcctgctgtacctggcctgccacaacatcatcaagaagcgcggccacttcctgttcgagggcgacttcgacagcgagaaccagttcgacaccagcatccaggccctgttcgagtacctgcgcgaggacatggaggtggacatcgacgccgacagccagaaggtgaaggagatcctgaaggacagcagcctgaagaacagcgagaagcagagccgcctgaacaagatcctgggcctgaagcccagcgacaagcagaagaaggccatcaccaacctgatcagcggcaacaagatcaacttcgccgacctgtacgacaaccccgacctgaaggacgccgagaagaacagcatcagcttcagcaaggacgacttcgacgccctgagcgacgacctggccagcatcctgggcgacagcttcgagctgctgctgaaggccaaggccgtgtacaactgcagcgtgctgagcaaggtgatcggcgacgagcagtacctgagcttcgccaaggtgaagatctacgagaagcacaagaccgaccttaccaagctgaagaacgtgatcaagaagcacttccccaaggactacaagaaggtgttcggctacaacaagaacgagaagaacaacaacaactacagcggctacgtgggcgtgtgcaagaccaagagcaagaagctgatcatcaacaacagcgtgaaccaggaggacttctacaagttcctgaagaccatcctgagcgccaagagcgagatcaaggaggtgaacgacatcctgaccgagatcgagaccggcaccttcctgcccaagcagatcagcaagagcaacgccgagatcccctaccagctgcgcaagatggagctggagaagatcctgagcaacgccgagaagcacttcagcttcctgaagcagaaggacgagaagggcctgagccacagcgagaagatcatcatgctgctgaccttcaagatcccctactacatcggccccatcaacgacaaccacaagaagttcttccccgaccgctgctgggtggtgaagaaggagaagagccccagcggcaagaccaccccctggaacttcttcgaccacatcgacaaggagaagaccgccgaggccttcatcaccagccgcaccaacttctgcacatacctggtgggcgagagcgtgctgcccaagagcagcctgctgtacagcgagtacaccgtgctgaacgagatcaacaacctgcagatcatcatcgacggcaagaacatctgcgacatcaagctgaagcagaagatctacgaggacctgttcaagaagtacaagaagatcacccagaagcagatcagcaccttcatcaagcacgagggcatctgcaacaagaccgacgaggtgatcatcctgggcatcgacaaggagtgcaccagcagcctgaagagctacatcgagctgaagaacatcttcggcaagcaggtggacgagatcagcaccaagaacatgctggaggagatcatccgctgggccaccatctacgacgagggcgagggcaagaccatcctgaagaccaagatcaaggccgagtacggcaagtactgcagcgacgagcagatcaagaagatcctgaacctgaagttcagcggctggggccgcctgagccgcaagttcctggagaccgtgaccagcgagatgcccggcttcagcgagcccgtgaacatcatcaccgccatgcgcgagacccagaacaacctgatggagctgctgagcagcgagttcaccttcaccgagaacatcaagaagatcaacagcggcttcgaggacgccgagaagcagttcagctacgacggcctggtgaagcccctgttcctgagccccagcgtgaagaagatgctgtggcagaccctgaagctggtgaaggagatcagccacatcacccaggctcctcctaagaagatcttcatcgagatggccaagggcgccgagctggagcctgctcgcaccaagacccgcctgaagatcctgcaggacctgtacaacaactgcaagaacgacgccgacgcattcagcagcgagatcaaggacctgagcggcaagatcgagaacgaggacaacctgcgcctgcgcagcgacaagctgtacctgtactacacccagctgggcaagtgcatgtactgcggcaagcccatcgagatcggccacgtgttcgacaccagcaactacgacatcgctgctatctacccccagagcaagatcaaggacgacagcatcagcaaccgcgtgctggtgtgcagcagctgcgccaagaacaaggaggacaagtaccctctgaagagcgagatccagagcaagcagcgcggcttctggaacttcctgcagcgcaacaacttcatcagcctggagaagctgaaccgcctgacccgcgccacccccatcagcgacgacgagaccgccaagttcatcgcccgccagctggtggagactcgccaagctaccaaggtggccgccaaggtgctggagaagatgttccccgagaccaagatcgtgtacagcaaggccgagaccgtgagcatgttccgcaacaagttcgacatcgtgaagtgccgcgagatcaacgacttccaccacgcccacgacgcctacctgaacatcgtggtgggcaacgtgtacaacaccaagttcaccaacaacccctggaatttcattaaggagaagcgcgacaaccccaagatcgccgacacctacaactactacaaggtgttcgactacgacgtgaagcgcaacaacatcaccgcctgggagaagggcaagaccatcatcaccgtgaaggacatgctgaagcgcaacacccccatctacacccgccaggccgcctgcaagaagggcgagctgttcaaccagaccatcatgaagaagggcctgggccagcaccccctgaagaaggagggccccttcagcaacatcagcaagtacggcggctacaacaaggtgagcgccgcctactacaccctgatcgagtacgaggagaagggcaacaagatccgcagcctggagaccatccccctgtacctggtgaaggacatccagaaggaccaggacgtgctgaagagctacctgaccgacctgctgggcaagaaggagttcaagatcctggtgcccaagatcaagatcaacagcctgctgaagatcaacggcttcccctgccacatcaccggcaagaccaacgacagcttcctgctgcgccccgccgtgcagttctgctgcagcaacaacgaggtgctgtacttcaagaagatcatccgcttcagcgagatccgcagccagcgcgagaagatcggcaagaccatcagcccctacgaggacctgagcttccgcagctacatcaaggagaacctgtggaagaagaccaagaacgacgagatcggcgagaaggagttctacgacctgctgcagaagaagaacctggagatctacgacatgctgctgaccaagcacaaggacaccatctacaagaagcgccccaacagcgccaccatcgacatcctggtgaagggcaaggagaagttcaagagcctgatcatcgagaaccagttcgaggtgatcctggagatcctgaagctgttcagcgccacccgcaacgtgagcgacctgcagcacatcggcggcagcaagtacagcggcgtggccaagatcggcaacaagatcagcagcctggacaactgcatcctgatctaccagagcatcaccggcatcttcgagaagcgcatcgacctgctgaaggtgtaa

SEQ ID NO: 24 - protein, 1053 aa, Streptococcus aureas
MKRNYILGLDIGITSVGYGIIDYETRDVIDAGVRLFKEANVENNEGRRSKRGARRLKRRRRHRIQRVKKLLFDYNLLTDHSELSGINPYEARVKGLSQKLSEEEFSAALLHLAKRRGVHNVNEVEEDTGNELSTKEQISRNSKALEEKYVAELQLERLKKDGEVRGSINRFKTSDYVKEAKQLLKVQKAYHQLDQSFIDTYIDLLETRRTYYEGPGEGSPFGWKDIKEWYEMLMGHCTYFPEELRSVKYAYNADLYNALNDLNNLVITRDENEKLEYYEKFQIIENVFKQKKKPTLKQIAKEILVNEEDIKGYRVTSTGKPEFTNLKVYHDIKDITARKEIIENAELLDQIAKILTIYQSSEDIQEELTNLNSELTQEEIEQISNLKGYTGTHNLSLKAINLILDELWHTNDNQIAIFNRLKLVPKKVDLSQQKEIPTTLVDDFILSPVVKRSFIQSIKVINAIIKKYGLPNDIIIELAREKNSKDAQKMINEMQKRNRQTNERIEEIIRTTGKENAKYLIEKIKLHDMQEGKCLYSLEAIPLEDLLNNPFNYEVDHIIPRSVSFDNSFNNKVLVKQEENSKKGNRTPFQYLSSSDSKISYETFKKHILNLAKGKGRISKTKKEYLLEERDINRFSVQKDFINRNLVDTRYATRGLMNLLRSYFRVNNLDVKVKSINGGFTSFLRRKWKFKKERNKGYKHHAEDALIIANADFIFKEWKKLDKAKKVMENQMFEEKQAESMPEIETEQEYKEIFITPHQIKHIKDFKDYKYSHRVDKKPNRELINDTLYSTRKDDKGNTLIVNNLNGLYDKDNDKLKKLINKSPEKLLMYHHDPQTYQKLKLIMEQYGDEKNPLYKYYEETGNYLTKYSKKDNGPVIKKIKYYGNKLNAHLDITDDYPNSRNKVVKLSLKPYRFDVYLDNGVYKFVTVKNLDVIKKENYYEVNSKCYEEAKKLKKISNQAEFIASFYNNDLIKINGELYRVIGVNNDLLNRIEVNMIDITYREYLENMNDKRPPRIIKTIASKTQSIKKYSTDILGNLYEVKSKKHPQIIKKG

SEQ ID NO: 25 - DNA, 3162 bp, Streptococcus aureas
  source 1..3162: mol_type = genomic DNA
atgaaaaggaattatatcttaggattagatatcggaattacatcagtgggttatggaattattgattatgaaactagagatgtcatagatgcgggcgtacgtttatttaaagaggctaatgttgaaaataatgaaggacgacgatcaaaaagaggtgccagaaggcttaagaggcgtcgtagacatagaatacaaagagtaaagaaacttttatttgattacaatttgttgacagatcatagtgagctaagtggaatcaatccttacgaggcgcgcgtaaagggattaagtcaaaaattaagtgaagaggaattttctgcggcattgctacatttagcaaagcgtagaggtgtacataatgttaatgaagtggaagaagatacaggtaatgaattatccactaaagaacaaatttcaagaaatagtaaagcgttagaagagaagtatgttgcagaattacagttggaacgtttgaaaaaagacggtgaagtgagaggttcgattaaccgtttcaaaacatctgactatgtaaaagaagcaaagcagttattaaaagtacaaaaagcatatcatcaacttgatcaatcatttatagacacttatattgatttattggaaacaagaagaacatattatgagggaccaggtgaaggtagcccatttggatggaaagatattaaagaatggtatgaaatgttaatgggacattgtacgtatttcccagaagaattacgtagtgtgaaatatgcctataatgctgatttatataatgcgctgaatgatttgaacaacttggttattacacgagatgagaatgagaagctagagtattatgaaaaattccaaattatcgagaatgtctttaaacaaaagaaaaagccgacgcttaaacaaattgcgaaggaaatcttggtgaatgaagaagacatcaaaggctatcgtgtcacaagtacaggtaaaccagaatttacaaacttgaaagtttatcacgatatcaaagatattacagcaagaaaagaaattatcgagaatgcagagctactcgatcaaatagctaaaatattaactatttaccagtcatcagaagatatacaagaagaattaacaaacctaaattcagaattgacacaagaagagattgaacaaatttcaaacttgaaaggttatacaggaactcataacctttcactaaaggcaataaatttaatattagacgaattgtggcatacgaacgataatcaaatagctattttcaatcgtttgaaacttgtacctaaaaaggtagatttaagccaacaaaaagaaattcctactactttagttgatgattttatactgtctccagtagtgaaacgttcatttatacaatctattaaagttattaacgctattattaaaaaatacggtttgccaaatgatattattattgaacttgcgagagaaaagaattctaaagatgcacaaaaaatgattaatgaaatgcagaagagaaatcgtcaaacgaatgaacgtattgaggaaattataagaacgacaggtaaagaaaatgctaaatatttaattgaaaaaattaagctgcacgatatgcaagaagggaaatgtttatactcgttagaagcaatccctctagaagatttacttaataatccattcaattacgaagtagaccatatcattccacgttctgtttctttcgataactctttcaataataaagtgttggtgaaacaagaagaaaatagtaaaaaaggtaatagaacgccatttcaatatttaagttcttcagattctaaaataagttatgagacattcaaaaagcatattttaaatcttgctaaaggcaaaggtagaatctctaagacgaaaaaagaatatttgttagaagaacgagatatcaatcgcttcagtgtccaaaaagattttattaaccgtaacttagtagatacacgctatgcgacaagagggttaatgaacttattaagatcttattttagagtgaataacttagatgtcaaagtgaaatcgattaatggcggattcacaagtttcttaagaaggaaatggaagttcaaaaaagaaagaaataagggctacaaacaccatgctgaagatgcactgattattgcgaacgctgattttattttcaaagaatggaaaaaactagataaagctaaaaaagtgatggaaaatcaaatgtttgaagaaaagcaagctgaaagtatgcctgaaattgagactgagcaagagtataaagaaatttttataacgcctcatcaaattaaacatattaaggattttaaagattataaatattcacatagagttgataaaaagccgaatagagagttaataaatgatacattatattctacgagaaaagatgacaagggtaatacattaatcgttaataacttaaatggtttatacgataaagataatgataaattgaaaaaattaattaataaatcacctgaaaaattattgatgtatcatcatgatccacaaacatatcaaaaattaaaattgatcatggaacaatatggcgatgagaaaaatccgctttataaatattatgaagaaacaggcaattacttaacaaaatatagtaaaaaagataacggaccagtcatcaaaaaaattaaatattatggtaacaagctaaatgcgcatttagatattacggatgattatccaaatagcagaaataaagtagtaaaactttcattaaaaccatatcgctttgatgtttatttagataatggggtatataaatttgtgacagttaaaaatttagatgttatcaaaaaagaaaactactatgaagttaattcaaagtgttatgaagaagcaaaaaaactgaagaaaattagtaatcaagcagaatttatcgcaagtttttacaataatgacttgattaagattaacggagaattatatagagtcataggtgtaaataatgatctacttaacagaattgaagtaaatatgatagacatcacatatagagaatatttagagaacatgaatgataaaagaccacctagaataattaaaacaatagcaagcaaaacacaatctattaaaaagtattctacagatattctaggcaatctttatgaagtgaagagtaaaaagcatcctcaaatcataaagaaaggatga

SEQ ID NO: 26 - protein, 1629 aa, Francisella tularensis
MNFKILPIAIDLGVKNTGVFSAFYQKGTSLERLDNKNGKVYELSKDSYTLLMNNRTARRHQRRGIDRKQLVKRLFKLIWTEQLNLEWDKDTQQAISFLFNRRGFSFITDGYSPEYLNIVPEQVKAILMDIFDDYNGEDDLDSYLKLATEQESKISEIYNKLMQKILEFKLMKLCTDIKDDKVSTKTLKEITSYEFELLADYLANYSESLKTQKFSYTDKQGNLKELSYYHHDKYNIQEFLKRHATINDRILDTLLTDDLDIWNFNFEKFDFDKNEEKLQNQEDKDHIQAHLHHFVFAVNKIKSEMASGGRHRSQYFQEITNVLDENNHQEGYLKNFCENLHNKKYSNLSVKNLVNLIGNLSNLELKPLRKYFNDKIHAKADHWDEQKFTETYCHWILGEWRVGVKDQDKKDGAKYSYKDLCNELKQKVTKAGLVDFLLELDPCRTIPPYLDNNNRKPPKCQSLILNPKFLDNQYPNWQQYLQELKKLQSIQNYLDSFETDLKVLKSSKDQPYFVEYKSSNQQIASGQRDYKDLDARILQFIFDRVKASDELLLNEIYFQAKKLKQKASSELEKLESSKKLDEVIANSQLSQILKSQHTNGIFEQGTFLHLVCKYYKQRQRARDSRLYIMPEYRYDKKLHKYNNTGRFDDDNQLLTYCNHKPRQKRYQLLNDLAGVLQVSPNFLKDKIGSDDDLFISKWLVEHIRGFKKACEDSLKIQKDNRGLLNHKINIARNTKGKCEKEIFNLICKIEGSEDKKGNYKHGLAYELGVLLFGEPNEASKPEFDRKIKKFNSIYSFAQIQQIAFAERKGNANTCAVCSADNAHRMQQIKITEPVEDNKDKIILSAKAQRLPAIPTRIVDGAVKKMATILAKNIVDDNWQNIKQVLSAKHQLHIPIITESNAFEFEPALADVKGKSLKDRRKKALERISPENIFKDKNNRIKEFAKGISAYSGANLTDGDFDGAKEELDHIIPRSHKKYGTLNDEANLICVTRGDNKNKGNRIFCLRDLADNYKLKQFETTDDLEIEKKIADTIWDANKKDFKFGNYRSFINLTPQEQKAFRHALFLADENPIKQAVIRAINNRNRTFVNGTQRYFAEVLANNIYLRAKKENLNTDKISFDYFGIPTIGNGRGIAEIRQLYEKVDSDIQAYAKGDKPQASYSHLIDAMLAFCIAADEHRNDGSIGLEIDKNYSLYPLDKNTGEVFTKDIFSQIKITDNEFSDKKLVRKKAIEGFNTHRQMTRDGIYAENYLPILIHKELNEVRKGYTWKNSEEIKIFKGKKYDIQQLNNLVYCLKFVDKPISIDIQISTLEELRNILTTNNIAATAEYYYINLKTQKLHEYYIENYNTALGYKKYSKEMEFLRSLAYRSERVKIKSIDDVKQVLDKDSNFIIGKITLPFKKEWQRLYREWQNTTIKDDYEFLKSFFNVKSITKLHKKVRKDFSLPISTNEGKFLVKRKTWDNNFIYQILNDSDSRADGTKPFIPAFDISKNEIVEAIIDSFTSKNIFWLPKNIELQKVDNKNIFAIDTSKWFEVETPSDLRDIGIATIQYKIDNNSRPKVRVKLDYVIDDDSKINYFMNHSLLKSRYPDKVLEILKQSTIIEFESSGFNKTIKEMLGMKLAGIYNETSNN

SEQ ID NO: 27 - DNA, 4890 bp, Francisella tularensis
  source 1..4890: mol_type = genomic DNA
atgaatttcaaaatattgccaatagcaatagatttaggtgttaaaaatactggtgtctttagcgcattttatcaaaaaggaacttctcttgagagattggataataaaaatggcaaagtatatgaactatcaaaagattcttatactttattgatgaataatagaacagcaagaagacatcaaagaagagggatagatagaaagcagctagtcaaaaggctctttaagcttatttggacagagcagctaaatttagagtgggataaagacactcaacaagcaattagctttttatttaatcgtagaggttttagttttattactgatggttattcgcctgaatatttaaatattgttccagagcaagtaaaagcgatacttatggatatatttgatgattacaacggtgaagatgatttagacagttatttaaaattagctactgagcaagaaagcaaaatttctgaaatttataacaagctaatgcaaaaaatattagagtttaaattaatgaaattatgtactgatattaaggatgataaagtaagtactaaaacgcttaaagaaatcacaagctatgaatttgagttattagctgattatttagcaaactatagcgagagtttaaaaacacaaaaatttagttatacagataaacaaggtaatttaaaagagctaagctactatcatcatgataaatataatattcaagaatttctaaagcgacatgctactataaatgatcgaattttagatactcttttaactgatgatttagatatttggaattttaattttgagaaatttgattttgataagaatgaagaaaagcttcagaatcaggaagataaagatcatatacaagcgcatttacatcattttgtttttgcagtaaataaaataaaaagtgaaatggcaagtggtggtcgtcatcgtagccaatattttcaagagataacaaatgtgctagatgaaaataatcatcaagagggatatctcaagaatttctgtgaaaatttgcataataaaaaatattcaaatttaagtgttaaaaatttagttaatctaattggtaacctaagtaatttagagctaaaaccgctaagaaaatattttaatgacaaaattcacgcaaaagctgatcattgggatgagcaaaagtttacagaaacttattgccactggatattaggagagtggcgagtaggtgtcaaagatcaagataagaaagatggcgctaaatatagttataaagatctgtgtaatgaattaaaacaaaaagttactaaggctggtttggtagattttttattagagttagatccatgtagaactataccaccatatctggataacaataaccgtaaaccaccaaaatgtcaaagtttgattttaaatccgaagtttttagataatcaatatccaaactggcaacaatatttacaagaattaaagaaactacaaagtattcaaaattatttagacagttttgaaactgatttaaaagtcttaaagtcaagtaaagatcaaccatattttgttgaatacaagagttcaaatcagcaaatagcaagtggtcaaagagattataaagatttagatgctcgaatattacagtttatatttgatagggtaaaagctagtgatgagttgcttttgaatgagatttattttcaggctaaaaaacttaaacaaaaagctagctctgagttagaaaaactcgagtcgagcaaaaagctagatgaagttatagcaaatagtcaactatcacagatactaaagtctcaacatacaaatggtatttttgaacagggtacttttttgcatttggtttgtaaatattataaacaaagacaaagagcgagagactctaggctatatattatgcctgaatatcgttatgataaaaaactacataaatataacaatacaggcaggtttgatgatgataatcagctgctaacatattgtaatcataagccaagacaaaaaagataccaattgttaaatgatttagctggggtgttgcaggtatcacctaattttttgaaagataaaattggttctgatgatgatctatttattagcaaatggttggtagagcatattagaggatttaaaaaagcttgtgaagatagtttaaaaatacaaaaagacaatagaggattattaaatcataaaataaatatagctaggaatacaaaaggcaaatgtgaaaaagaaatatttaatttaatatgtaaaatagaaggttcagaagataaaaaaggtaattacaagcatggtttagcttacgaattaggagtacttttatttggtgaacctaatgaagctagtaaacctgagttcgatagaaaaattaaaaaatttaactcaatatacagttttgcacagattcaacaaattgcttttgcagagcgtaaaggcaatgctaacacttgtgcagtttgtagtgctgataatgctcatagaatgcaacaaattaagatcactgagcctgtagaggacaataaagataagataatcttaagtgccaaagctcagagactaccagcgattccaactagaatagttgacggtgcggttaagaaaatggcaactatattagctaaaaatatagttgatgataattggcagaatatcaaacaagttttatcagcaaaacatcagttacatatacctattatcacagaatcaaatgcttttgagtttgaaccagcattagctgatgtaaaaggtaagagcctaaaagataggagaaaaaaagcattagagagaataagtcctgaaaatatattcaaggataaaaacaatagaataaaagaatttgctaaaggtatatcagcatatagtggtgctaatttaactgatggcgattttgatggtgcaaaagaagaattagatcatataatacctcgttcacataaaaaatacggtactctaaatgatgaagcaaatctaatttgtgtaactcgtggtgataataaaaataaaggtaatagaattttctgcctacgtgatcttgcagataactataaactaaaacagtttgagacaactgatgatttagaaattgaaaagaagatagctgatacaatctgggatgctaacaagaaagattttaaatttggtaattatcgtagttttattaacctaacaccacaagagcagaaagcatttcgtcacgcgctatttctggctgatgaaaatcctatcaaacaagcagtcataagagcgataaataatcgtaatcgtacatttgtaaatggcactcaacgctattttgcagaagtactggcaaacaatatctatctaagggctaaaaaagaaaatctaaatacagataaaatttcatttgattattttggtattccaactataggtaatggtagaggtattgctgaaatccgtcaactttatgaaaaagttgatagtgatatacaagcttatgcaaaaggtgataaacctcaagctagctactctcacctaatagatgcgatgctggctttttgtattgctgctgatgaacacagaaatgatggaagtataggtctagaaatcgataaaaattatagtttatatccattagataaaaatacaggagaagtctttaccaaagatatttttagtcaaattaaaattactgataatgagtttagcgataaaaaattagtaagaaaaaaagctatagagggctttaacacgcatagacaaatgactagagatggcatttatgcagaaaattacctaccaatactaatccataaagaactaaatgaagttagaaaaggctatacttggaaaaatagtgaagaaataaaaatattcaaaggtaaaaagtacgatatacaacaattgaataaccttgtgtattgtctaaaatttgtagataaacctatatctatagatatacaaattagtaccttagaagagttaagaaatatattaacaacaaataatatagctgctacagcagaatactattatataaatctaaaaacccaaaaattacatgagtattatatcgaaaactataatactgccttaggttataaaaaatacagtaaagaaatggagtttttgagaagcttagcttatcgtagcgaaagggtaaaaattaaatcaatagatgatgtaaagcaggttttggataaggatagtaactttatcatcggtaagattactttaccatttaaaaaagagtggcaaagactatatcgtgagtggcaaaatacaactatcaaagatgattatgagtttttaaaatcattctttaatgttaaaagtattactaagttgcataaaaaagttagaaaagatttctctttacctatttctacaaatgaaggtaaattcctggtcaaaagaaaaacatgggataacaattttatctatcagatattaaatgattctgattctagagcagacggaacaaagccatttattccagcttttgacatttctaaaaatgaaatagtcgaagccataattgattcatttacatcaaaaaatattttttggctgcctaaaaatatagaattacaaaaggtggataataaaaacatttttgctatagatactagtaaatggttcgaagtagaaacacctagtgatcttagagacattggaatagcaacaattcaatacaagatagataataattctcgccctaaagtcagagttaaacttgattatgttatcgatgatgatagtaagataaattattttatgaatcattctttattaaaatcaagatatcctgacaaagttttagaaattttaaaacaatcaactattatagaatttgaaagttcaggttttaataaaactatcaaagaaatgcttggtatgaaattagcaggtatttataatgaaacatctaataattag

SEQ ID NO: 28 - protein, 1300 aa, Francisella tularensis
  source 1..1300: note = subsp. novicida (strain U112)
MSIYQEFVNKYSLSKTLRFELIPQGKTLENIKARGLILDDEKRAKDYKKAKQIIDKYHQFFIEEILSSVCISEDLLQNYSDVYFKLKKSDDDNLQKDFKSAKDTIKKQISEYIKDSEKFKNLFNQNLIDAKKGQESDLILWLKQSKDNGIELFKANSDITDIDEALEIIKSFKGWTTYFKGFHENRKNVYSSNDIPTSIIYRIVDDNLPKFLENKAKYESLKDKAPEAINYEQIKKDLAEELTFDIDYKTSEVNQRVFSLDEVFEIANFNNYLNQSGITKFNTIIGGKFVNGENTKRKGINEYINLYSQQINDKTLKKYKMSVLFKQILSDTESKSFVIDKLEDDSDVVTTMQSFYEQIAAFKTVEEKSIKETLSLLFDDLKAQKLDLSKIYFKNDKSLTDLSQQVFDDYSVIGTAVLEYITQQIAPKNLDNPSKKEQELIAKKTEKAKYLSLETIKLALEEFNKHRDIDKQCRFEEILANFAAIPMIFDEIAQNKDNLAQISIKYQNQGKKDLLQASAEDDVKAIKDLLDQTNNLLHKLKIFHISQSEDKANILDKDEHFYLVFEECYFELANIVPLYNKIRNYITQKPYSDEKFKLNFENSTLANGWDKNKEPDNTAILFIKDDKYYLGVMNKKNNKIFDDKAIKENKGEGYKKIVYKLLPGANKMLPKVFFSAKSIKFYNPSEDILRIRNHSTHTKNGSPQKGYEKFEFNIEDCRKFIDFYKQSISKHPEWKDFGFRFSDTQRYNSIDEFYREVENQGYKLTFENISESYIDSVVNQGKLYLFQIYNKDFSAYSKGRPNLHTLYWKALFDERNLQDVVYKLNGEAELFYRKQSIPKKITHPAKEAIANKNKDNPKKESVFEYDLIKDKRFTEDKFFFHCPITINFKSSGANKFNDEINLLLKEKANDVHILSIDRGERHLAYYTLVDGKGNIIKQDTFNIIGNDRMKTNYHDKLAAIEKDRDSARKDWKKINNIKEMKEGYLSQVVHEIAKLVIEYNAIVVFEDLNFGFKRGRFKVEKQVYQKLEKMLIEKLNYLVFKDNEFDKTGGVLRAYQLTAPFETFKKMGKQTGIIYYVPAGFTSKICPVTGFVNQLYPKYESVSKSQEFFSKFDKICYNLDKGYFEFSFDYKNFGDKAAKGKWTIASFGSRLINFRNSDKNHNWDTREVYPTKELEKLLKDYSIEYGHGECIKAAICGESDKKFFAKLTSVLNTILQMRNSKTGTELDYLISPVADVNGNFFDSRQAPKNMPQDADANGAYHIGLKGLMLLGRIKNNQEGKKLNLVIKNEEYFEFVQNRNN

SEQ ID NO: 29 - protein, 1307 aa, Acidaminococcus sp.
  source 1..1307: note = strain BV3L6
MTQFEGFTNLYQVSKTLRFELIPQGKTLKHIQEQGFIEEDKARNDHYKELKPIIDRIYKTYADQCLQLVQLDWENLSAAIDSYRKEKTEETRNALIEEQATYRNAIHDYFIGRTDNLTDAINKRHAEIYKGLFKAELFNGKVLKQLGTVTTTEHENALLRSFDKFTTYFSGFYENRKNVFSAEDISTAIPHRIVQDNFPKFKENCHIFTRLITAVPSLREHFENVKKAIGIFVSTSIEEVFSFPFYNQLLTQTQIDLYNQLLGGISREAGTEKIKGLNEVLNLAIQKNDETAHIIASLPHRFIPLFKQILSDRNTLSFILEEFKSDEEVIQSFCKYKTLLRNENVLETAEALFNELNSIDLTHIFISHKKLETISSALCDHWDTLRNALYERRISELTGKITKSAKEKVQRSLKHEDINLQEIISAAGKELSEAFKQKTSEILSHAHAALDQPLPTTLKKQEEKEILKSQLDSLLGLYHLLDWFAVDESNEVDPEFSARLTGIKLEMEPSLSFYNKARNYATKKPYSVEKFKLNFQMPTLASGWDVNKEKNNGAILFVKNGLYYLGIMPKQKGRYKALSFEPTEKTSEGFDKMYYDYFPDAAKMIPKCSTQLKAVTAHFQTHTTPILLSNNFIEPLEITKEIYDLNNPEKEPKKFQTAYAKKTGDQKGYREALCKWIDFTRDFLSKYTKTTSIDLSSLRPSSQYKDLGEYYAELNPLLYHISFQRIAEKEIMDAVETGKLYLFQIYNKDFAKGHHGKPNLHTLYWTGLFSPENLAKTSIKLNGQAELFYRPKSRMKRMAHRLGEKMLNKKLKDQKTPIPDTLYQELYDYVNHRLSHDLSDEARALLPNVITKEVSHEIIKDRRFTSDKFFFHVPITLNYQAANSPSKFNQRVNAYLKEHPETPIIGIDRGERNLIYITVIDSTGKILEQRSLNTIQQFDYQKKLDNREKERVAARQAWSVVGTIKDLKQGYLSQVIHEIVDLMIHYQAVVVLENLNFGFKSKRTGIAEKAVYQQFEKMLIDKLNCLVLKDYPAEKVGGVLNPYQLTDQFTSFAKMGTQSGFLFYVPAPYTSKIDPLTGFVDPFVWKTIKNHESRKHFLEGFDFLHYDVKTGDFILHFKMNRNLSFQRGLPGFMPAWDIVFEKNETQFDAKGTPFIAGKRIVPVIENHRFTGRYRDLYPANELIALLEEKGIVFRDGSNILPKLLENDDSHAIDTMVALIRSVLQMRNSNAATGEDYINSPVRDLNGVCFDSRFQNPEWPMDADANGAYHIALKGQLLLNHLKESKDLKLQNGISNQDWLAYIQELRN

SEQ ID NO: 30 - protein, 1064 aa, Bradyrhizobium sp.
  source 1..1064: note = BTAi1
MKRTSLRAYRLGVDLGANSLGWFVVWLDDHGQPEGLGPGGVRIFPDGRNPQSKQSNAAGRRLARSARRRRDRYLQRRGKLMGLLVKHGLMPADEPARKRLECLDPYGLRAKALDEVLPLHHVGRALFHLNQRRGLFANRAIEQGDKDASAIKAAAGRLQTSMQACGARTLGEFLNRRHQLRATVRARSPVGGDVQARYEFYPTRAMVDAEFEAIWAAQAPHHPTMTAEAHDTIREAIFSQRAMKRPSIGKCSLDPATSQDDVDGFRCAWSHPLAQRFRIWQDVRNLAVVETGPTSSRLGKEDQDKVARALLQTDQLSFDEIRGLLGLPSDARFNLESDRRDHLKGDATGAILSARRHFGPAWHDRSLDRQIDIVALLESALDEAAIIASLGTTHSLDEAAAQRALSALLPDGYCRLGLRAIKRVLPLMEAGRTYAEAASAAGYDHALLPGGKLSPTGYLPYYGQWLQNDVVGSDDERDTNERRWGRLPNPTVHIGIGQLRRVVNELIRWHGPPAEITVELTRDLKLSPRRLAELEREQAENQRKNDKRTSLLRKLGLPASTHNLLKLRLWDEQGDVASECPYTGEAIGLERLVSDDVDIDHLIPFSISWDDSAANKVVCMRYANREKGNRTPFEAFGHRQGRPYDWADIAERAARLPRGKRWRFGPGARAQFEELGDFQARLLNETSWLARVAKQYLAAVTHPHRIHVLPGRLTALLRATWELNDLLPGSDDRAAKSRKDHRHHAIDALVAALTDQALLRRMANAHDDTRRKIEVLLPWPTFRIDLETRLKAMLVSHKPDHGLQARLHEDTAYGTVEHPETEDGANLVYRKTFVDISEKEIDRIRDRRLRDLVRAHVAGERQQGKTLKAAVLSFAQRRDIAGHPNGIRHVRLTKSIKPDYLVPIRDKAGRIYKSYNAGENAFVDILQAESGRWIARATTVFQANQANESHDAPAAQPIMRVFKGDMLRIDHAGAEKFVKIVRLSPSNNLLYLVEHHQAGVFQTRHDDPEDSFRWLFASFDKLREWNAELVRIDTLGQPWRRKRGLETGSEDATRIGWTRPKKWP

SEQ ID NO: 31 - protein, 1035 aa, Candidatus sp.
MRRLGLDLGTNSIGWCLLDLGDDGEPVSIFRTGARIFSDGRDPKSLGSLKATRREARLTRRRRDRFIQRQKNLINALVKYGLMPADEIQRQALAYKDPYPIRKKALDEAIDPYEMGRAIFHINQRRGFKSNRKSADNEAGVVKQSIADLEMKLGEAGARTIGEFLADRQATNDTVRARRLSGTNALYEFYPDRYMLEQEFDTLWAKQAAFNPSLYIEAARERLKEIVFFQRKLKPQEVGRCIFLSDEDRISKALPSFQRFRIYQELSNLAWIDHDGVAHRITASLALRDHLFDELEHKKKLTFKAMRAILRKQGVVDYPVGFNLESDNRDHLIGNLTSCIMRDAKKMIGSAWDRLDEEEQDSFILMLQDDQKGDDEVRSILTQQYGLSDDVAEDCLDVRLPDGHGSLSKKAIDRILPVLRDQGLIYYDAVKEAGLGEANLYDPYAALSDKLDYYGKALAGHVMGASGKFEDSDEKRYGTISNPTVHIALNQVRAVVNELIRLHGKPDEVVIEIGRDLPMGADGKRELERFQKEGRAKNERARDELKKLGHIDSRESRQKFQLWEQLAKEPVDRCCPFTGKMMSISDLFSDKVEIEHLLPFSLTLDDSMANKTVCFRQANRDKGNRAPFDAFGNSPAGYDWQEILGRSQNLPYAKRWRFLPDAMKRFEADGGFLERQLNDTRYISRYTTEYISTIIPKNKIWVVTGRLTSLLRGFWGLNSILRGHNTDDGTPAKKSRDDHRHHAIDAIVVGMTSRGLLQKVSKAARRSEDLDLTRLFEGRIDPWDGFRDEVKKHIDAIIVSHRPRKKSQGALHNDTAYGIVEHAENGASTVVHRVPITSLGKQSDIEKVRDPLIKSALLNETAGLSGKSFENAVQKWCADNSIKSLRIVETVSIIPITDKEGVAYKGYKGDGNAYMDIYQDPTSSKWKGEIVSRFDANQKGFIPSWQSQFPTARLIMRLRINDLLKLQDGEIEEIYRVQRLSGSKILMAPHTEANVDARDRDKNDTFKLTSKSPGKLQSASARKVHISPTGLIREG

SEQ ID NO: 32 - protein, 1358 aa, Acidaminococcus sp.
MGKMYYLGLDIGTNSVGYAVTDPSYHLLKFKGEPMWGAHVFAAGNQSAERRSFRTSRRRLDRRQQRVKLVQEIFAPVISPIDPRFFIRLHESALWRDDVAETDKHIFFNDPTYTDKEYYSDYPTIHHLIVDLMESSEKHDPRLVYLAVAWLVAHRGHFLNEVDKDNIGDVLSFDAFYPEFLAFLSDNGVSPWVCESKALQATLLSRNSVNDKYKALKSLIFGSQKPEDNFDANISEDGLIQLLAGKKVKVNKLFPQESNDASFTLNDKEDAIEEILGTLTPDECEWIAHIRRLFDWAIMKHALKDGRTISESKVKLYEQHHHDLTQLKYFVKTYLAKEYDDIFRNVDSETTKNYVAYSYHVKEVKGTLPKNKATQEEFCKYVLGKVKNIECSEADKVDFDEMIQRLTDNSFMPKQVSGENRVIPYQLYYYELKTILNKAASYLPFLTQCGKDAISNQDKLLSIMTFRIPYFVGPLRKDNSEHAWLERKAGKIYPWNFNDKVDLDKSEEAFIRRMTNTCTYYPGEDVLPLDSLIYEKFMILNEINNIRIDGYPISVDVKQQVFGLFEKKRRVTVKDIQNLLLSLGALDKHGKLTGIDTTIHSNYNTYHHFKSLMERGVLTRDDVERIVERMTYSDDTKRVRLWLNNNYGTLTADDVKHISRLRKHDFGRLSKMFLTGLKGVHKETGERASILDFMWNTNDNLMQLLSECYTFSDEITKLQEAYYAKAQLSLNDFLDSMYISNAVKRPIYRTLAVVNDIRKACGTAPKRIFIEMARDGESKKKRSVTRREQIKNLYRSIRKDFQQEVDFLEKILENKSDGQLQSDALYLYFAQLGRDMYTGDPIKLEHIKDQSFYNIDHIYPQSMVKDDSLDNKVLVQSEINGEKSSRYPLDAAIRNKMKPLWDAYYNHGLISLKKYQRLTRSTPFTDDEKWDFINRQLVETRQSTKALAILLKRKFPDTEIVYSKAGLSSDFRHEFGLVKSRNINDLHHAKDAFLAIVTGNVYHERFNRRWFMVNQPYSVKTKTLFTHSIKNGNFVAWNGEEDLGRIVKMLKQNKNTIHFTRFSFDRKEGLFDIQPLKASTGLVPRKAGLDVVKYGGYDKSTAAYYLLVRFTLEDKKTQHKLMMIPVEGLYKARIDHDKEFLTDYAQTTISEILQKDKQKVINIMFPMGTRHIKLNSMISIDGFYLSIGGKSSKGKSVLCHAMVPLIVPHKIECYIKAMESFARKFKENNKLRIVEKFDKITVEDNLNLYELFLQKLQHNPYNKFFSTQFDVLTNGRSTFTKLSPEEQVQTLLNILSIFKTCRSSGCDLKSINGSAQAARIMISADLTGLSKKYSDIRLVEQSASGLFVSKSQNLLEYL

SEQ ID NO: 33 - protein, 1358 aa, Acidaminococcus sp.; identical to SEQ ID NO: 32
  source 1..1358: note = D21

SEQ ID NO: 34 - protein, 1138 aa, Acidothermus cellulolyticus
MGGSEVGTVPVTWRLGVDVGERSIGLAAVSYEEDKPKEILAAVSWIHDGGVGDERSGASRLALRGMARRARRLRRFRRARLRDLDMLLSELGWTPLPDKNVSPVDAWLARKRLAEEYVVDETERRRLLGYAVSHMARHRGWRNPWTTIKDLKNLPQPSDSWERTRESLEARYSVSLEPGTVGQWAGYLLQRAPGIRLNPTQQSAGRRAELSNATAFETRLRQEDVLWELRCIADVQGLPEDVVSNVIDAVFCQKRPSVPAERIGRDPLDPSQLRASRACLEFQEYRIVAAVANLRIRDGSGSRPLSLEERNAVIEALLAQTERSLTWSDIALEILKLPNESDLTSVPEEDGPSSLAYSQFAPFDETSARIAEFIAKNRRKIPTFAQWWQEQDRTSRSDLVAALADNSIAGEEEQELLVHLPDAELEALEGLALPSGRVAYSRLTLSGLTRVMRDDGVDVHNARKTCFGVDDNWRPPLPALHEATGHPVVDRNLAILRKFLSSATMRWGPPQSIVVELARGASESRERQAEEEAARRAHRKANDRIRAELRASGLSDPSPADLVRARLLELYDCHCMYCGAPISWENSELDHIVPRTDGGSNRHENLAITCGACNKEKGRRPFASWAETSNRVQLRDVIDRVQKLKYSGNMYWTRDEFSRYKKSVVARLKRRTSDPEVIQSIESTGYAAVALRDRLLSYGEKNGVAQVAVFRGGVTAEARRWLDISIERLFSRVAIFAQSTSTKRLDRRHHAVDAVVLTTLTPGVAKTLADARSRRVSAEFWRRPSDVNRHSTEEPQSPAYRQWKESCSGLGDLLISTAARDSIAVAAPLRLRPTGALHEETLRAFSEHTVGAAWKGAELRRIVEPEVYAAFLALTDPGGRFLKVSPSEDVLPADENRHIVLSDRVLGPRDRVKLFPDDRGSIRVRGGAAYIASFHHARVFRWGSSHSPSFALLRVSLADLAVAGLLRDGVDVFTAELPPWTPAWRYASIALVKAVESGDAKQVGWLVPGDELDFGPEGVTTAAGDLSMFLKYFPERHWVVTGFEDDKRINLKPAFLSAEQAEVLRTERSDRPDTLTEAGEILAQFFPRCWRATVAKVLCHPGLTVIRRTALGQPRWRRGHLPYSWRPWSADPWSGGTP

SEQ ID NO: 35 - protein, 1045 aa, Acidovorax avenae
MQKEKPLAYRLALDLGSTSLGWAVLRLSAPGEPSAVIRAGSRIFSDGRNPKDGSSLAVTRRAARAMRRRRDRLLKRKARMLAALERHGFFPQDEAARKALEKLNPYGLRARGLESALKPEEFGRALFHLNQRRGFQSNRKTDRKDSDSGALKQAIGTLRAQMHESGCRTVGEWFWKVRMERKPEGVKGQGVRARYRETPFTTDEGKKRIDKRYDLYVDRAMVAQEFDALWAAQATFAPALFNEAARAELRDILLHQRKLRPVQPGRCTLVPEEPRALLALPSTQRFRIYQEVNHLRVLHDELREEALTLAQRDQIVALLERQAKVTFTAMRKALGFSALFNLEDAKRDGLKGNATTAALGKKDLFGPLWAGFDTALQDEIVTQLMTEESEPRLIAWLQEHTGVDEARAQAIANAGLPEGYGSLGRTALARIVPELQRDVITYDKAVQAAGFAHHSDLGFSFEHDADEVERIGERTIASTGEIKPVFAFKQLPYYGRALQRHVAFAKENPRNDEERYGKIANPTVHIGLNQVRVVVNALMCRYGRPTEVVIELARDLKQSREQKLEAQQRQADNQKRNARIRRSIAEVLGISEERVRTLDIQKWILWEELSHDAADRRCPYSGVQISASMLLGERVEIEHILPFSMTLDDSLNNRTVALREANRIKRNRTPWDARTDFEAHGWSYDGILQRAERMPQRKRHRFAPDGYERWLGEDKDFLARALNDTRYLSRVAAEYLRLVCPGSATRVIPGQMTALLRGKFGLNDVLGLDGEKNRNDHRHHAVDACVIGVTDQRMMQRFAQANAQAREDGLTRLVEDMPLPWPTYRAHVERAVRHIWVSHKPDHGFEGAMMEETSYGILRDGTIKQRRKADGSAGREISRLIRITEPSQPQRHGVDAEGRPLPYKGYVGGSNYCLEITVNDKGKWEGQVISTFDAYRIVREGGLRQLRHSTQGQNGQALAMRLVIGDSVRLEVDEQERVMRIVKINGNNGQVFMAPVHEANVDARNSDKNEAFAYTSKIAGSFQKTKARQVTISPIGELRDPGFKG

SEQ ID NO: 36 - protein, 1131 aa, Acidovorax ebreus
MAQHVFGLDIGIASVGWAILGEQRIIDLGVRCFDKAETAKEGDPLNLTRRQARLLRRRLYRRAWRLTQLSRLLKRKGLIADAKLFAKAPSYGDSAWELRRQGLDRLLTPLEWARVIYHQCKHRGFHWTSKAEEAKADSDAEGGRVKQGLAHTKALMQAKNYRSAAEMVLAEFPDAQRNKRGQYDKALSRVLLGEELALLFATQRRLGNPHASDFFEKLILGDGDRKSGLFWQQKPALSGADLLKMLGKCTFEKGEYRAPKASFSVERHVWLTRLNNLRIVVDGRSRPLNEAERQAALLLPYQTETSKYKTLKNAFIKAGLWGDGVRFGGLAYPSQAQIDAEKTKDPEDQFLVKLPAWHELRKAFKAAGHEALWQQISTPALDGDPTLLDQIATVLSVYKDGAEVVQQLRQLALPEPAASIAVLEKISFDKFSSLSLKALRRIVPLMQSGLRYDEAVAQIPEYGHHSQRIEPGAAKHLYLPPFYEAQRKYAGKGDHIGSMQFRDDADIPRNPVVLRALNQARKVVNALIREYGSPIAVNIEMARDLSRPLDERNKVKRAQEEFRDRNDRARSEFERDFGYKPKAAAFEKWMLYREQLGQCAYSQQPLDIQRVLDDHNYAQVDHALPYSRSYDDSKNNKVLVLTHENQNKGNRTAFEYLTSFPDGEDGERWRTFVAWVQGNKAYRMAKRNRLLRKNYGVDESKGFIDRNLNDTRYICKFFKNYVEEHLQLAARADGDTARRCVVVNGQLTAFLRARWGLTKVRGDSDRHHALDAAVVAACTHGMVKALADYSRRKEISFLQEGFPDPETGEILNPAAFDRARQHFPEPWTHFAHELKARLFTDDLAALREDMQRLGSYTTEDLGRLRTLFVSRAPQRRSGGAVHKETIYAQPESLKQQGGVIEKILLTSLKLQDFDKLLNPESNDHFVEPHRNERLYAAIRQRLEQFGGRADKAFGPDNLFHKPDKNNQPTGPVVRSIKLVRGKQTGIPIRGGLAKNDSMLRVDIFTKAGKFHLVPVYVHHRVTGLPNRAIVAFKDEDEWTLIDESFAFLFSVYPNDYVKVTLKKEQQSGYYSGADRSTGAMNLWAHDRAASVGKDGLIRGIGVKTALSVEKFNVDVLGRIYLAPPETRSGLA

SEQ ID NO: 37 - protein, 1056 aa, Actinobacillus minor
  source 1..1056: note = NM305
MKALNYILGLDLGIASVGWAVVEIDQNELPIRLIDLGVRTFERAEVPKTGDSLALARRLARSSRRLVRRRAVRLLKAKRLLKQEGILQADDFHSSHLKPLPNNPWELRVKGLNHLLDRKEWAAVLLHLLKHRGYLSQRKNESKTDNKELGALLKGVSENRQLLQAQAFSTPAEIAIKKFQQEEGHIRNQRGAYSHTFDRNDLLAELRLLFQKQREFNNPYTSQSLEQAIAELLMWQKPALSGEAILKMLGKCTFEPSEYKAPKNSYSAEYFVWLTKLNNLRILENGADRGLTAEERQLLINQPFEKAKFTYAQARKLLELSDLAIFKGVRYGKDNAESATLMEMKAWHAIRKALESNGLKTEWNGLKTKPELLDKIGTAFSIYKTDEDISQYLNGELSPAVLNALLENLSFDKFIRLSLQSLAKILPLMEQGLRYDEACKQVYGDHYGKKEQLELRFLPKIPVEDIRNPVVLRTLSQARKVINGVVRLYGSPARIHIETGREVGKSFSERRDISKRQEENRNERQRAVEKFKEFFPHFVGEPKAKDILKMRLYEQQHGKCLYSGKELDLNRLLEKGYVEIDHALPFSRTWDDSFNNKVLVLASENQNKGNQTPYEWLNGKENAERWKLFQALVNGSRFPYSKKQRILTKYLDEDGFRERNLNDTRYVARFLCNFIEDNMQLVGQGKKRVFASNGQITALLRRSWGIQKVREDNDRHHAVDAVVVACSTRALQKKITDYVRYKEMNVFTGEKIDQETGEIIKFHFPEPWKFFRQEVEIRVFSETPAEDVVIALPDRPQANHEFIQPLFVSRAPTRKMTGQGHMETIKSAKRLAEGLSVSRVPLTQLKLKDLENMVNREREKALYEALKVRLEKFNNDPAKAFADPFYKKGGQQVKAVRVEQVQKSGVLVRQENGVADNASMVRVDVFIKGGKYFLVPIYTWQVAKGILPNRAATQGKEEEYWDIMDETAIFQFSLYQNDLIKLVTKKKTIFGYFNGLNRATSNINIKEHDLDKSKGKDGIYLEVGVKLALSLEKYQVDELGKNIQPCRSMKKRPPVR

SEQ ID NO: 38 - protein, 1054 aa, Actinobacillus pleuropneumoniae
  source 1..1054: note = serovar 10 str. D13039
MKLTPLNYILGLDLGIASVGWAVVEIDEQENPLGLIDVGVRTFDRAEVAKTGESLALARRLARSSRRLVKRRADRIKKVKRLLKSENILLSADEQLPNDVWQLRVKGLDQKLERQEWAAVLLHLLKHRGYLSQRKNESKSENKELGALRSGVAANHQILQSAEYRTPAEIAVKKFHVEEGHIRNQRGAYTHTFSRLDLLAEIELLFTRQTELGNPHTSAKLLENLTALLMWQKPALAGEAILKMLGKCTFEPTEYKAAKNSYSAERFVWLTKLNNLRILEQGAERALTDNERFALLDQPYEKAKFTYAQARTMLALPDEAIFKGVRYQGEDKKAVETKTILMEMKAYHQIRKALENADLKAEWNELKNNSELLDDIGTAFSLHKTDEDICRYLDGKLSESILNALLENLNFDKFIQLSLKALQQILPLMLQGQRYDEAVSAIYGDHYGKKSAEINRLLPTIPADEIRNPVVLRTLTQARKVINAVVRLYGSPARIHIETGREVGKSYQDRKKLEKQQEDNRKHRESAVQKFKEYFPNFVGEPKGKDILKMRLYELQQAKCLYSGKSLELHRLLEKGYVEVDHALPFSRTWDDSFNNKVLVLANENQNKGNLTPYEWLDGKNNSEPWQNFVARVQTSGFSHTKKQRILSHKLDEKGFIERNLNDTRYVVRFLCNFIADNMLLTGKGKRKVFASNGQITALLRGRWGLQKVRDDNDRHHALDAVVVACSTVAMQQKITRFVRYEEGNVFSGERIDRETGEIIPLHFPSPWAFFRENVEIRIFSENPKLELENRLPDYPQYNHEFVQPLFVSRMPTRKMTGQGHMETVKSAKRLDEGLSVLKVPLTQLKLNDLERMVNREREMALYESLKVRLEQFDNDPAKAFAEPFYKKGGALVKAVRVEQTQKSGVLVRDGNGVADNASMVRVDVFTKAGKYFLVPIYTWQVAKGILPNKAVTANVDEIDWLEMDESYQFIFTMYPNDLVKVKLKKEEFFGYYGGLDRATGAIVIKEHDLEKSKGRQGIYRIGVKLALSFEKYQVDELGKNIRPCRPTKRQHVR

SEQ ID NO: 39 - protein, 1062 aa, Actinobacillus succinogenes
MNLNYILGLDLGIASVGWAVVEIDEQENPQRLIDVGVRTFDRAEVLKTGESLALARRLARSSRRLVKRRAERIKKAKRLLKAENLLLSADEILPNEAWQLRVKGLDQKLERQEWAAVLLHLLKHRGYLSQRKNESKSENKELGALLSGVAINHQILQSAEYRTPAEIAVNKFQAEEGHIRNQRGAYTHTFSRLDLLAEMELLFQRQATLGNPHTSTKLLENLTALLMWQKPALAGEAILKMLGKCTFEPTEYKAAKNSYSAERFVWLTKLNNLRILEQGAERALTDNERFALLDQPYEKAKLTYAQVRTLLGLSDEAIFKGLRYQGEDKKAVETKTTLMEVKAYHQIRKALEGLDLKAEWNELKNNPALLDEIGTAFSLYKTDDDIHRYLDGKLSESVLNALLENLNFDKFIQLSLKALQQILPLMLQGQRYDEAVSAIYGDHYGKKSDEIDRLLPNIPTDEIRNPVVLRTLTQARKVINAVVRLYGSPARIHIETGREVGKSYQDRKKLEKQQEENRKQRENAVKKFKEYFPNFVGEPKGKDILKMRLYELQQAKCLYSGKSLELYRLLEKGYVEVDHALPFSRTWDDSFNNKVLVLANENQNKGNATPYEWLDGKNNSEGWQHFVARVQTSGFSYAKKQRVLIQELDEKSFIERNLNDTRYVARFLCNHIADNMLLTGKGKRKVFASNGQITALLRGCWGLQKVRENNDRHHALDAVVVACSTKSMQDKITKFVKYKEGRLFKDKKDGVYKGERINRETGEIISLHFPTPWKFFKENVEIRIFSENPKLELENRLPDYPQYNHEFVQPLFVSRMPTRKMTGQGHMETVKSAKRLDKGLSVLKVPLTQLKLSDLERMVNREREMALYEALKECLEQFGNDPAKAFAEPFYKKGGALVKAVRVEQTQKSGVLVRNGNGVADNATGSIVRVDVFTKGGKYFLVPIYTWQVAKGILPNKAVIQGKDESEWEEMDENAVFQFSMHKNDLIKVKTKKGEIFGYFNGLDRATGSIEIEEHDLEKSKGKNGSHRGLGVKTAFFLEKYQVDELGKNIRPCRPTKRQHVR

SEQ ID NO: 40 - protein, 1054 aa, Actinobacillus suis
MKLTPLNYILGLDLGIASVGWAVVEIDEQENPLGLIDVGVRTFDRAEVPKTGESLALARRLARSARRLVKRRADRIKKAKRLLKAENILLSADEHLPNDVWQLRVKGLDQKLERQEWAAVLLHLLKHRGYLSQRKNESKSENKELGALLSGVETNHQILQSAEYRTPAEIAVKKFHVEDGHIRNQRGAYTHTFSRLDLLAEMELLFQRQTDLGNPHTSAKLLENLTALLMWQKPALAGEAILKMLGKCTFEPTEYKAAKNSYSAERFVWLTKLNNLRILEQGAERALTDNERFALLDQPYEKAKFTYAQARTMLALPDEAIFKGVRYQGEDKKAVETKTILMEMKAYHQIRKALENADLKAEWNELKNNSELLDDIGTAFSLHKTDEDICRYLDGKLSESILNALLENLNFDKFIQLSLKALQQILPLMLQGQRYDEAVSAIYGDHYGKKSAEINRLLPTIPADEIRNPVVLRTLTQARKVINAVVRLYGSPARIHIETGREVGKSYQDRKKLEKQQEDNRKQRESAVKKFKEYFPNFVGEPKGKDILKMRLYELQQAKCLYSGKSLELHRLLEKGYVEVDHALPFSRTWDDSFNNKVLVLANENQNKGNLTPYEWLDGKNNSEHWQNFVARVQTSGFSHTKKQRILSHKLDEKGFIERNLNDTRYVARFLCNFIADNMLLTGKGKRKVFASNGQITALLRGRWGLQKVRDDNDRHHALDAVVVACSTVVMQQKITRFVRYEEGNVFSGERIDRETGEIIPLHFPSPWAFFRENVEIRIFSENPKLELENRLPDYPQYNHEFVQPLFVSRMPTRKMTGQGHMETVKSAKRLDEGLSVLKVPLTQLKLSDLERMVNREREVTLYESLKARLEQFGNDPAKAFAEPFHKKGGAVVKAVRVEQTQKSGVLVRDGNGVADNASMVRVDVFTKGGKYFLVPIYTWQVAKGILPNKAVTANVDEIDWLEMDESYQFIFTMYPNDLVKVKLKKEEFFGYYGGLDRATGAIVIKEHDLEKSKGKQGIYRIGVKLALSFEKYQVDELGKNIRPCRPTKRQHVR

SEQ ID NO: 41 - protein, 1105 aa, Actinomyces coleocanis
  source 1..1105: note = DSM 15436
MDNKNYRIGIDVGLNSIGFCAVEVDQHDTPLGFLNLSVYRHDAGIDPNGKKTNTTRLAMSGVARRTRRLFRKRKRRLAALDRFIEAQGWTLPDHADYKDPYTPWLVRAELAQTPIRDENDLHEKLAIAVRHIARHRGWRSPWVPVRSLHVEQPPSDQYLALKERVEAKTLLQMPEGATPAEMVVALDLSVDVNLRPKNREKTDTRPENKKPGFLGGKLMQSDNANELRKIAKIQGLDDALLRELIELVFAADSPKGASGELVGYDVLPGQHGKRRAEKAHPAFQRYRIASIVSNLRIRHLGSGADERLDVETQKRVFEYLLNAKPTADITWSDVAEEIGVERNLLMGTATQTADGERASAKPPVDVTNVAFATCKIKPLKEWWLNADYEARCVMVSALSHAEKLTEGTAAEVEVAEFLQNLSDEDNEKLDSFSLPIGRAAYSVDSLERLTKRMIENGEDLFEARVNEFGVSEDWRPPAEPIGARVGNPAVDRVLKAVNRYLMAAEAEWGAPLSVNIEHVREGFISKRQAVEIDRENQKRYQRNQAVRSQIADHINATSGVRGSDVTRYLAIQRQNGECLYCGTAITFVNSEMDHIVPRAGLGSTNTRDNLVATCERCNKSKSNKPFAVWAAECGIPGVSVAEALKRVDFWIADGFASSKEHRELQKGVKDRLKRKVSDPEIDNRSMESVAWMARELAHRVQYYFDEKHTGTKVRVFRGSLTSAARKASGFESRVNFIGGNGKTRLDRRHHAMDAATVAMLRNSVAKTLVLRGNIRASERAIGAAETWKSFRGENVADRQIFESWSENMRVLVEKFNLALYNDEVSIFSSLRLQLGNGKAHDDTITKLQMHKVGDAWSLTEIDRASTPALWCALTRQPDFTWKDGLPANEDRTIIVNGTHYGPLDKVGIFGKAAASLLVRGGSVDIGSAIHHARIYRIAGKKPTYGMVRVFAPDLLRYRNEDLFNVELPPQSVSMRYAEPKVREAIREGKAEYLGWLVVGDELLLDLSSETSGQIAELQQDFPGTTHWTVAGFFSPSRLRLRPVYLAQEGLGEDVSEGSKSIIAGQGWRPAVNKVFGSAMPEVIRRDGLGRKRRFSYSGLPVSWQG

SEQ ID NO: 42 - protein, 1113 aa, Actinomyces georgiae
  source 1..1113: note = F0490
MSASSQNVERIRYKVGIDVGLRSIGFCAVQVDADDRPVKLLNTVVHVHDAGVSPADAKKADTRKLVSGVARRTRRLYRTRKRRLVDLDRQLDGLGWPLVDPARFADPREPWFAREKLVSGRVDDADERKELLSVALRHIAHHRGWRNPYSTVESLQADAPPSEFLQGLNQRVSEKLGTELDPGLTQGQLVAKLLHRFPNAKIRGPEGILRGKLHQSDNAGELRLICRTQGLDCHITEELVRLVFQAKSPKANKEMRKRIGRDQLPGQGAHIRAEKAHPVFQRFRIVAVLANLRIREAHVDRRLTAEEMRTLTDFLLGLAGSEQPTWEELADNLNIERHQLRGTAKASVDGAPALRFPPIDATTDRIYASKLKWLAEWWRQADEERRGYMVDALSNSGGSEDEPYLDDEIAEMLEQASEEDQAKLDSLHLPGGRASYCLDTLRRLTDAMLGGGLDLFEARKAVFHVDDDWAPPTDPIGAPVGNPPVDRVLKHVARWLEAATGRWGAPQTINIEHVREGLGSEKAARELTRMNDRRRRNNQKLVEEMGEKLGMSGRIRRSDRMRYEAIRRQNCECLYCGQPITYQTMEMDHIVPRAGAASTNSRSNLAAVCRRCNHQKGKLPFAVWAESQDSPAEVRLQDAVQRVRHWLRDAGMGQKELQALRVQVIARLKSKRPDEEFDGRSMESIAWMANELRARVEAQYRGSGTTVRVYRGALTAEARKASGFEGRVNLIGGRGKDRFDRRHHAMDALVIALMNQSVAQTLALRLNMRDSQWLTQSEQTWRQFHGAPGEAARKWEAWDRDMRDASDLFNLALDGGRIPITENVRLRVGNGRVHEDGVIRFKPEYEVKGKTIKGGEARLLGDSLPSEQIDRAETPALWTALTRLPEYDRKSGLPENPDRVIRVNGAVVQATDRIRFFGTPASVAVRGGYAKLGESIHHARIYRINGKTPKYAMIRVYTIDLMRLNHEDIFTAVLKPSTISMRCAEKKLKYAIAEGNAEQIGWLVEGDQLELDAAAYAKGVGADLMREYPMATCWRVAGFPDEAKLRLRPVLLAAEGMGEDAPKFMREVLENQGWRPAVNALLSPGSVRVVRRNVLGEPRFKSSGHLPTTVDLV

SEQ ID NO: 43 - protein, 1101 aa, Actinomyces naeslundii
  source 1..1101: note = str. Howell 279
MWYASLMSAHHLRVGIDVGTHSVGLATLRVDDHGTPIELLSALSHIHDSGVGKEGKKDHDTRKKLSGIARRARRLLHHRRTQLQQLDEVLRDLGFPIPTPGEFLDLNEQTDPYRVWRVRARLVEEKLPEELRGPAISMAVRHIARHRGWRNPYSKVESLLSPAEESPFMKALRERILATTGEVLDDGITPGQAMAQVALTHNISMRGPEGILGKLHQSDNANEIRKICARQGVSPDVCKQLLRAVFKADSPRGSAVSRVAPDPLPGQGSFRRAPKCDPEFQRFRIISIVANLRISETKGENRPLTADERRHVVTFLTEDSQADLTWVDVAEKLGVHRRDLRGTAVHTDDGERSAARPPIDATDRIMRQTKISSLKTWWEEADSEQRGAMIRYLYEDPTDSECAEIIAELPEEDQAKLDSLHLPAGRAAYSRESLTALSDHMLATTDDLHEARKRLFGVDDSWAPPAEAINAPVGNPSVDRTLKIVGRYLSAVESMWGTPEVIHVEHVRDGFTSERMADERDKANRRRYNDNQEAMKKIQRDYGKEGYISRGDIVRLDALELQGCACLYCGTTIGYHTCQLDHIVPQAGPGSNNRRGNLVAVCERCNRSKSNTPFAVWAQKCGIPHVGVKEAIGRVRGWRKQTPNTSSEDLTRLKKEVIARLRRTQEDPEIDERSMESVAWMANELHHRIAAAYPETTVMVYRGSITAAARKAAGIDSRINLIGEKGRKDRIDRRHHAVDASVVALMEASVAKTLAERSSLRGEQRLTGKEQTWKQYTGSTVGAREHFEMWRGHMLHLTELFNERLAEDKVYVTQNIRLRLSDGNAHTVNPSKLVSHRLGDGLTVQQIDRACTPALWCALTREKDFDEKNGLPAREDRAIRVHGHEIKSSDYIQVFSKRKKTDSDRDETPFGAIAVRGGFVEIGPSIHHARIYRVEGKKPVYAMLRVFTHDLLSQRHGDLFSAVIPPQSISMRCAEPKLRKAITTGNATYLGWVVVGDELEINVDSFTKYAIGRFLEDFPNTTRWRICGYDTNSKLTLKPIVLAAEGLENPSSAVNEIVELKGWRVAINVLTKVHPTVVRRDALGRPRYSSRSNLPTSWTIE

SEQ ID NO: 44 - protein, 1144 aa, Actinomyces sp.
  source 1..1144: note = ICM47
MSMIDSSENVPGIRYRVGIDVGLKSIGFCAVEVDRNDQPVRMLNSMVFIHDAGVDPNENKAAKSRKLTAGVARRTRRLYRTRHQRLVNLDRVLSKEFGWPLPDLTSFKDPREPWHVRAGLLEGYIADDEKRKEALSIALRHIARHRGWRNPYAKVETLLQPSEPSDFLKGLNDRISEELGRAFPADATPGQLVDTYLAHPDYVGRAGTPKLRGPQGILAGKLHQSDNAQEIRGICDVQRIEPAERDRLIRVVFEAKSPKGSAKERGLVGYDELPGQGRHVRAEKAHPAFQLFRMVSVLANLRIREGREERPLTPDELEDLVDFINQVSLKQEVTWQDLADKLRIERADLRGTAKASFDGSPVLRNPPTDVTTEKIMACKVKWLKEWWKEADDEQRGYMVDAFSNSGGSEDGTDVNDEVAELLEQATEDDQLEFEKISLPQGRAAYSLDSLRRLTDRMLRDGVDLHTARRLEFNVGDDWKPAVEPIGAPTGNPAVDRVLKQVSRWLHAATERWGEPTVINIEHARDGLGSERVARELMRENEKRRKANASAVAEMAAKLKLSGKVHRSDQIRYFALQRQNCQCLYCGAPITYTTAEMDHIVPRADGSSTNDRSNLAAVCRTCNHMKGKIPFAVWASSDKANQGVSLTGALERVNMWQRDSGMSPRQLKQLQREVCARLKSKKPDQEFDGRSMESVAWMAVELRTRIEGFYRSRDEESVPSVGVYRGQLTAEARRASGFESRVNLIGGRGKTRFDRRHHAMDALVIALMNPSVSRTLALRLNMRDAQRLTGVEETWKHFYGKPGEASKRFESWRESMLRGVELFNIALSDNAIPFVENIRLRVGSSVIHDATVHSFCPPKTPDGKQIITKGYGEQHSLGSAMPVELIDRAETPALWTALTRCPDFDPKKGLPENPQRTISVNGTRVGPTELVNFFEFSKSGPKACLKVRGGYVDLSGAIHHARIYRIAGKKTAYAMIRVFQVDLLRLKDHDVFTTPLKPSTISMRTAEPKIREALANGTATQIGWLVEGDELVIDTSKYSGGFIGEVLARYPEATSWRVAGFMTPAKLRIKPILLSKEGFVDETQAALLGVEVTSEAIQKTVDRPGWLPAVNVLFGAGGVRVIRRNCLGEERYHSSASLPVSMTLE

SEQ ID NO: 45 - protein, 1095 aa, Actinomyces sp.
  source 1..1095: note = oral taxon 175 str. F0384
MPAHHLRVGIDVGTHSVGLATLRVDDQGTPIELLSALSHIHDSGIGKEGQKDHDTRKKLSGVARRTRHLLRNRRERLQQLDKVLVDLGFPIPKPEEYPDLSERTDPYRVWRVRARLVEETLPEELRGPAISMAVRHIARHRGWRNPYSKVESLLSPAEESSFMKALRKRIMTKTGEVLDDDITPGQAMAQVALTHKIYMRGPEGILGKLHQSDNANEIRKICARQGISSDVCKQLLRAVFKAESPRGSAVSRVAPDPLPGQGSFRRAPKCDPEFQRFRIISIVANLRISETKGENRPLTVDERRQVVAFLMEDSQADLTWVDVAEKLRVSRQALRGTAMLTADGERSAAQPPIDVTDQIMRKTKISALKTWWDKADAERRGAMVRYLYEGLEDSECAEVIAKLPEKDHAKLDSLHLPAGRAAYSRESLTALSDHMLETTNDLHEARKRLFGVDDSWAPPAEPVGAPVGNPSVDRTLKIVARYLSAVESIWGTPEVIHVEHVRDGFTSERTAEERDKANRSRHNDNQKAIEKIQHDYGKEGYISRGDIVRFHALKLQGSACLYCGTTIGYHTCQLDHIVPQAGPGSNNRRGNLVAVCERCNHSKSNTPFAVWAQKCGIPHVGVKEAISRVNGWVEHNHSTSSGDLTRLKKEVIARLRRTQKDPEIDERSMESVAWMANELHHRIAAAYPETTVMVYRGSITAAARKAASIESRINLIGEKGRKDRLDRRHHAVDASVVALMEPSVAKTLAERSSLRGEQRLTGQEQTWKQYTGLTVGARERFEAWRGHMHRLTELFNESLAADEVYVTQNIRLRLSDGSAHTVKASKLVSHRLGDGLTVQQIDRACTPALWCALTREIDFDEKNGLPAREDRVIRVHGQEISSADCIQVFSKRKKTKSDRDEAPFGAIAVRGGFVEIGSSIHHARIYRIEGEKPAYAMLRVFTHDLLSQRHGDLFSAVIPPQSISMRCAATELRQAISEGRATYLGWIVSGDELHIPVETFTTHKIGSFLKDYPNTTRWRICGYDSETMLILKPRILSAEGLNNSSDIAEYVIKNKGWRVAINKLAKVHPTVVRRDALGRPRHSSRSNLPVTWSIE

SEQ ID NO: 46 - protein, 1181 aa, Actinomyces sp.
  source 1..1181: note = oral taxon 180 str. F0310
MLHCIAVIRVPPSEEPGFFETHADSCALCHHGCMTYAANDKAIRYRVGIDVGLRSIGFCAVEVDDEDHPIRILNSVVHVHDAGTGGPGETESLRKRSGVAARARRRGRAEKQRLKKLDVLLEELGWGVSSNELLDSHAPWHIRKRLVSEYIEDETERRQCLSVAMAHIARHRGWRNSFSKVDTLLLEQAPSDRMQGLKERVEDRTGLQFSEEVTQGELVATLLEHDGDVTIRGFVRKGGKATKVHGVLEGKYMQSDLVAELRQICRTQRVSETTFEKLVLSIFHSKEPAPSAARQRERVGLDELQLALDPAAKQPRAERAHPAFQKFKVVATLANMRIREQSAGERSLTSEELNRVARYLLNHTESESPTWDDVARKLEVPRHRLRGSSRASLETGGGLTYPPVDDTTVRVMSAEVDWLADWWDCANDESRGHMIDAISNGCGSEPDDVEDEEVNELISSATAEDMLKLELLAKKLPSGRVAYSLKTLREVTAAILETGDDLSQAITRLYGVDPGWVPTPAPIEAPVGNPSVDRVLKQVARWLKFASKRWGVPQTVNIEHTREGLKSASLLEEERERWERFEARREIRQKEMYKRLGISGPFRRSDQVRYEILDLQDCACLYCGNEINFQTFEVDHIIPRVDASSDSRRTNLAAVCHSCNSAKGGLAFGQWVKRGDCPSGVSLENAIKRVRSWSKDRLGLTEKAMGKRKSEVISRLKTEMPYEEFDGRSMESVAWMAIELKKRIEGYFNSDRPEGCAAVQVNAYSGRLTACARRAAHVDKRVRLIRLKGDDGHHKNRFDRRNHAMDALVIALMTPAIARTIAVREDRREAQQLTRAFESWKNFLGSEERMQDRWESWIGDVEYACDRLNELIDADKIPVTENLRLRNSGKLHADQPESLKKARRGSKRPRPQRYVLGDALPADVINRVTDPGLWTALVRAPGFDSQLGLPADLNRGLKLRGKRISADFPIDYFPTDSPALAVQGGYVGLEFHHARLYRIIGPKEKVKYALLRVCAIDLCGIDCDDLFEVELKPSSISMRTADAKLKEAMGNGSAKQIGWLVLGDEIQIDPTKFPKQSIGKFLKECGPVSSWRVSALDTPSKITLKPRLLSNEPLLKTSRVGGHESDLVVAECVEKIMKKTGWVVEINALCQSGLIRVIRRNALGEVRTSPKSGLPISLNLR

SEQ ID NO: 47 - protein, 1103 aa, Actinomyces sp.
  source 1..1103: note = oral taxon 181 str. F0379
MTKINDDLRYRVGIDVGLKSIGFCAVEVDENDQPLRLLNSMVFVHDAGVDPNENKAAKSRKLTAGVARRTQRGTAQNRRRLAELDRALSEELNWPLPNLEDFEDSYEPWHTRAELVEHYIKDDAERAEALAIAIRHIARHRGWRNPYLSVDSLLTPQEPSKFLRGLNERVTQALGREFPADATPGQLICAYIDSPKYAETQGIRGDSGILSGKLHQFDNVGEIRKICEVQRLDHDVFKLLVRKVFFAKSPRGSAAGLVGHDQIPGQGKYIRAEKAHPDFQLFRIVAVLTNLRIREGKAERCLTPDELRGLVDYILEVQLKQQVTWADLADNLGIERTDLRGTARASFDGSPALRFPPTDVTAEKIMASKVKWLKDWWDKADSERRGFMVDALSNSGGSTGDNDIDDEVAALLEAATEDEQAELEKIQLPQGRAAYSLDSLRRLTKRMLEEGVDLHTARKEEFNVDDDWRPEPEPIEAPVGNPAVDRVLKQVARWLNMATDRWGVPDVINIEHTRDGLGSEKVARELLRESQKRQDLNQKDMDKMIRELGISGKARRSSLIKYQAIQRQNSMCLYCGTEIGFETAEMDHIVPRALSGSTNDRSNLAAVCRACNHQKGAVPFAVWATSGEAHAGVSLEDAIKRVRLWQKGPGMSPKQHKAFQNEVISRLKSRKPDEEFDGRSMESVAWMAVELRTRIDGYYRKVNSDSVPKVGIYRGQLTAEARKASGFENRVNLIGGKGKTRFDRRHHAMDALVIAMMNQSVSQTLALRVNMRESQRITGQEETWKNFYGKPGQASERFEKWREGMLRAVELFNIELAKNAIPFHENVRLRVGSSKVHDDTVRKFIHAKLGEALSVAMIDCAETPALWTALTRLPDFDPKDGLPEDLSREIYIHSRKITADEQLNFFNSPSACLKVRGGYVEIGSSIHHARVYRIDGKKTTYSMVRVFATDLVKMTHEDVFTTPLKPSTISMRTADPKIRKALADGTATQIGWLVEGDELQLETDKYSGGLIGEVLAEYPQLTSWRVAGFYGVTQLRLRPYMLAAEGIPSDASESLRKVIEGKGWLPAINALLSSGCVKVVRRNCLGEPRFNAKSSLPVSQLLR

SEQ ID NO: 48 - protein, 1120 aa, Actinomyces sp.
  source 1..1120: note = oral taxon 848 str. F0332
MNAMKQYNAGIDVGINSVGFAAIEVDSKGLPLNILNNMVVLHDSGVDPGTAKTGATRLANSGTARRTRKLIARRRKRLQKLDRYIEVQGWPLVDFSSLPDPYTPWKIRAKLTQDRLEGEEQGRGLSIALRHMARHRGWRNPYEGVESLHSPKEASKQFKDLKDRVTKVSGVIFDEDATPAEVVCDIGLSPKQRLRSAPSAKYKEGATLADEPVGGKSKEGLLGGKLMQSDNANELRKIGIVQGLSNEKVNEIIDQVFASESPKGQAGKRAKKDELPGQEQYVRALRAHLAFQRFRIVAAVANLRILEAEPKHERLLSQSEKDKVIEFLMSADGDDGVTWSDVAEELGIERECLSGTAKRGADGERPSSFPPTNSTNISIVRSKVKPLIEWWRKASDDEQATLVTALSNADELTDDQPSAETVRQFLSSPDEQSQEKIDKISLPKGRAAYSVNSLERLTRRMLKDSVDLFEARKREFGVDNNWTPTPDSIGEPVGNPAVDRVLKIVNRWLLAVTRKWGPPKVVNIEHVRVGFTSAAQTRKYEEENKTNRERNLAILEELRDKFGTSGKIRREDITRFAALRRQNCQCAYCGEAITFFDCEMDHIVPRKGPGSTNTRNNLVAICERCNKSKSNMPFSLWAQNCDIPGVSVEAVIDRVRTWIKDPELNPKQYNNFKKDVIERLRKTVDDDAIDNRSIESVAWMATELADRIGSHFRTAGANTKVRVYRGWLTSEARKASGFEGKINLIGGRGKTRLDRRHHAMDAATIALMRQSVAQTLVERASIRESDRLRRVVSSSWKDYRGADRDKQFSYGSWLNSMNALAELFNRAIDADGIPVTQNLRLRLGNGEAHDATIRSLEKKRVGASWTIGEIDRASTPQLWLALTRQEDFDQNDGLPANASRELRVKNHWFHAEENVTLFPTKSAAIAVRGGYAEIGNTIHHARLYKLPGKKLTYGMIRVFAIDLLCAWHTDLFSSPLLPESISLRTAETKVRRAVEDGAAMYIGWLVDGDEIVLDPETKAFKSNKIGEYLCEFPGTKRWKVDGFPDKEKLRLRPLQLAGEGLPEDVSAGTEEILGPKGNGWRVAINALFKSSQLVVVRRTALGMVRKLSRRHLPLTTRLRG

SEQ ID NO: 49 - protein, 1114 aa, Actinomyces turicensis
  source 1..1114: note = ACS-279-V-Col4
MQFHFYMVYVTMKGMNDKDASQQLRYRVGIDVGTHSIGFCAVEVDESGMPIQLLNSMVHKHDSGIDPGGNDTATTRLAEAGVARRTRRLIRRRKKRLQELDAFIEECGWPLVDLATITDARSPWRIRAHLATEHIDDEAEQGKLLSIALRHMARHRGWRSPYARISSLHIQADPSEQLKALAQRVSEKTGISLTADQTPAQLISVYLDVFETGKLRGPEGILGGKLMQSDNANELRRIATVQGLDNDLLKKIIGFVFAAESPKGSAAKRVGKDVLPGAHGLRAEKAHPAFQQFRIVSIVQNLRIKEGTGLRALTSEETEIVVDFLNQAGLTEAPTWEEVADNLEIPRSHLKGTATEGFDGIAPSTRPPFDVTSQKILNGKLKKLSAWWKDADYDHRCAMVNALSNVGSDDEGSLADDDVREFLSDFTDEELEALDKVELPGGRAAYSVDSLEKLTNTMLSEGCDLHSARKIAFGVDDSWTPPAEPIGQPVGNPAVDRVLKQVARWISAATNQWGTPESVNIEHVRDALGSEKASREYQRSLQTRRIRNEKLFAEMRERLDIGGKPRRSELTRYLALQRQNCQCLYCGMPITYTDAEMDHIVPRKGAASTNTRENFAAVCRACNHQKSNLPFAVWAEKTERPGVSVKEAYKRVSDMRIEPGMNGRQMNEFRKAIRLRLTTKHADAEIDGRSLESVAWMANELRHRIEGFYRSAENDVTVRVFRGAVTAEGRRASGFESRVNLIGGKGKTRLDRRHHAMDALTIALMEPGIAQTIALRMNMRESQRVLGEQETWKSFTGGSDTARKRWEHWCEEMLRASELFNVFLAEDRIPICQNKRLRLGSSAVHKAIVQPFEASDKRIVSDAMPVELIDRASTPALWTALTRDPDFDPKEGLPANPSRTIRLHDKRLGPNETVEFFPTAAACLAIRGGYCEIGAGIHHARIFRISGKKTTYAMLRVYQCDLVRFQKENLLTVELPANTISVRTAVPKLREALAHGTAEQIGWLVVGDELKIDLSGFTTGQIETFNETYPQATRWEVTGFPTKTQLRLKPLLIASEGLADDVPDDIVKIVKGPGWWPAIDKLLKIGNVVLYRRDTHGKPRVVSHRSLPLSSKLQ

SEQ ID NO: 50 - protein, 1101 aa, Akkermansia muciniphila
MSRSLTFSFDIGYASIGWAVIASASHDDADPSVCGCGTVLFPKDDCQAFKRREYRRLRRNIRSRRVRIERIGRLLVQAQIITPEMKETSGHPAPFYLASEALKGHRTLAPIELWHVLRWYAHNRGYDNNASWSNSLSEDGGNGEDTERVKHAQDLMDKHGTATMAETICRELKLEEGKADAPMEVSTPAYKNLNTAFPRLIVEKEVRRILELSAPLIPGLTAEIIELIAQHHPLTTEQRGVLLQHGIKLARRYRGSLLFGQLIPRFDNRIISRCPVTWAQVYEAELKKGNSEQSARERAEKLSKVPTANCPEFYEYRMARILCNIRADGEPLSAEIRRELMNQARQEGKLTKASLEKAISSRLGKETETNVSNYFTLHPDSEEALYLNPAVEVLQRSGIGQILSPSVYRIAANRLRRGKSVTPNYLLNLLKSRGESGEALEKKIEKESKKKEADYADTPLKPKYATGRAPYARTVLKKVVEEILDGEDPTRPARGEAHPDGELKAHDGCLYCLLDTDSSVNQHQKERRLDTMTNNHLVRHRMLILDRLLKDLIQDFADGQKDRISRVCVEVGKELTTFSAMDSKKIQRELTLRQKSHTDAVNRLKRKLPGKALSANLIRKCRIAMDMNWTCPFTGATYGDHELENLELEHIVPHSFRQSNALSSLVLTWPGVNRMKGQRTGYDFVEQEQENPVPDKPNLHICSLNNYRELVEKLDDKKGHEDDRRRKKKRKALLMVRGLSHKHQSQNHEAMKEIGMTEGMMTQSSHLMKLACKSIKTSLPDAHIDMIPGAVTAEVRKAWDVFGVFKELCPEAADPDSGKILKENLRSLTHLHHALDACVLGLIPYIIPAHHNGLLRRVLAMRRIPEKLIPQVRPVANQRHYVLNDDGRMMLRDLSASLKENIREQLMEQRVIQHVPADMGGALLKETMQRVLSVDGSGEDAMVSLSKKKDGKKEKNQVKASKLVGVFPEGPSKLKALKAAIEIDGNYGVALDPKPVVIRHIKVFKRIMALKEQNGGKPVRILKKGMLIHLTSSKDPKHAGVWRIESIQDSKGGVKLDLQRAHCAVPKNKTHECNWREVDLISLLKKYQMKRYPTSYTGTPR

SEQ ID NO: 51 - protein, 1113 aa, Alcanivorax pacificus
  source 1..1113: note = W11-5
MRYRVGLDLGTASVGAAVFSMDEQGNPMELIWHYERLFSEPLVPDMGQLKPKKAARRLARQQRRQIDRRASRLRRIAIVSRRLGIAPGRNDSGVHGNDVPTLRAMAVNERIELGQLRAVLLRMGKKRGYGGTFKAVRKVGEAGEVASGASRLEEEMVALASVQNKDSVTVGEYLAARVEHGLPSKLKVAANNEYYAPEYALFRQYLGLPAIKGRPDCLPNMYALRHQIEHEFERIWATQSQFHDVMKDHGVKEEIRNAIFFQRPLKSPADKVGRCSLQTNLPRAPRAQIAAQNFRIEKQMADLRWGMGRRAEMLNDHQKAVIRELLNQQKELSFRKIYKELERAGCPGPEGKGLNMDRAALGGRDDLSGNTTLAAWRKLGLEDRWQELDEVTQIQVINFLADLGSPEQLDTDDWSCRFMGKNGRPRNFSDEFVAFMNELRMTDGFDRLSKMGFEGGRSSYSIKALKALTEWMIAPHWRETPETHRVDEEAAIRECYPESLATPAQGGRQSKLEPPPLTGNEVVDVALRQVRHTINMMIDDLGSVPAQIVVEMAREMKGGVTRRNDIEKQNKRFASERKKAAQSIEENGKTPTPARILRYQLWIEQGHQCPYCESNISLEQALSGAYTNFEHILPRTLTQIGRKRSELVLAHRECNDEKGNRTPYQAFGHDDRRWRIVEQRANALPKKSSRKTRLLLLKDFEGEALTDESIDEFADRQLHESSWLAKVTTQWLSSLGSDVYVSRGSLTAELRRRWGLDTVIPQVRFESGMPVVDEEGAEITPEEFEKFRLQWEGHRVTREMRTDRRPDKRIDHRHHLVDAIVTALTSRSLYQQYAKAWKVADEKQRHGRVDVKVELPMPILTIRDIALEAVRSVRISHKPDRYPDGRFFEATAYGIAQRLDERSGEKVDWLVSRKSLTDLAPEKKSIDVDKVRANISRIVGEAIRLHISNIFEKRVSKGMTPQQALREPIEFQGNILRKVRCFYSKADDCVRIEHSSRRGHHYKMLLNDGFAYMEVPCKEGILYGVPNLVRPSEAVGIKRAPESGDFIRFYKGDTVKNIKTGRVYTIKQILGDGGGKLILTPVTETKPADLLSAKWGRLKVGGRNIHLLRLCAE

SEQ ID NO: 52 - protein, 1029 aa, Alicycliphilus denitrificans
  source 1..1029: note = BC
MRSLRYRLALDLGSTSLGWALFRLDACNRPTAVIKAGVRIFSDGRNPKDGSSLAVTRRAARAMRRRRDRLLKRKTRMQAKLVEHGFFPADAGKRKALEQLNPYALRAKGLQEALLPGEFARALFHINQRRGFKSNRKTDKKDNDSGVLKKAIGQLRQQMAEQGSRTVGEYLWTRLQQGQGVRARYREKPYTTEEGKKRIDKSYDLYIDRAMIEQEFDALWAAQAAFNPTLFHEAARADLKDTLLHQRPLRPVKPGRCTLLPEEERAPLALPSTQRFRIHQEVNHLRLLDENLREVALTLAQRDAVVTALETKAKLSFEQIRKLLKLSGSVQFNLEDAKRTELKGNATSAALARKELFGAAWSGFDEALQDEIVWQLVTEEGEGALIAWLQTHTGVDEARAQAIVDVSLPEGYGNLSRKALARIVPALRAAVITYDKAVQAAGFDHHSQLGFEYDASEVEDLVHPETGEIRSVFKQLPYYGKALQRHVAFGSGKPEDPDEKRYGKIANPTVHIGLNQVRMVVNALIRRYGRPTEVVIELARDLKQSREQKVEAQRRQADNQRRNARIRRSIAEVLGIGEERVRGSDIQKWICWEELSFDAADRRCPYSGVQISAAMLLSDEVEVEHILPFSKTLDDSLNNRTVAMRQANRIKRNRTPWDARAEFEAQGWSYEDILQRAERMPLRKRYRFAPDGYERWLGDDKDFLARALNDTRYLSRVAAEYLRLVCPGTRVIPGQLTALLRGKFGLNDVLGLDGEKNRNDHRHHAVDACVIGVTDQGLMQRFATASAQARGDGLTRLVDGMPMPWPTYRDHVERAVRHIWVSHRPDHGFEGAMMEETSYGIRKDGSIKQRRKADGSAGREISNLIRIHEATQPLRHGVSADGQPLAYKGYVGGSNYCIEITVNDKGKWEGEVISTFRAYGVVRAGGMGRLRNPHEGQNGRKLIMRLVIGDSVRLEVDGAERTMRIVKISGSNGQIFMAPIHEANVDARNTDKQDAFTYTSKYAGSLQKAKTRRVTISPIGEVRDPGFKG

SEQ ID NO: 53 - protein, 1029 aa, Alicycliphilus sp.; identical to SEQ ID NO: 52

SEQ ID NO: 54 - protein, 1146 aa, Alicyclobacillus hesperidum
  source 1..1146: note = URH17-3-68
MAYRLGLDIGITSVGWAVVALEKDESGLKPVRIQDLGVRIFDKAEDSKTGASLALPRREARSARRRTRRRRHRLWRVKRLLEQHGILSMEQIEALYAQRTSSPDVYALRVAGLDRCLIAEEIARVLIHIAHRRGFQSNRKSEIKDSDAGKLLKAVQENENLMQSKGYRTVAEMLVSEATKTDAEGKLVHGKKHGYVSNVRNKAGEYRHTVSRQAIVDEVRKIFAAQRALGNDVMSEELEDSYLKILCSQRNFDDGPGGDSPYGHGSVSPDGVRQSIYERMVGSCTFETGEKRAPRSSYSFERFQLLTKVVNLRIYRQQEDGGRYPCELTQTERARVIDCAYEQTKITYGKLRKLLDMKDTESFAGLTYGLNRSRNKTEDTVFVEMKFYHEVRKALQRAGVFIQDLSIETLDQIGWILSVWKSDDNRRKKLSTLGLSDNVIEELLPLNGSKFGHLSLKAIRKILPFLEDGYSYDVACELAGYQFQGKTEYVKQRLLPPLGEGEVTNPVVRRALSQAIKVVNAVIRKHGSPESIHIELARELSKNLDERRKIEKAQKENQKNNEQIKDEIREILGSAHVTGRDIVKYKLFKQQQEFCMYSGEKLDVTRLFEPGYAEVDHIIPYGISFDDSYDNKVLVKTEQNRQKGNRTPLEYLRDKPEQKAKFIALVESIPLSQKKKNHLLMDKRAIDLEQEGFRERNLSDTRYITRALMNHIQAWLLFDETASTRSKRVVCVNGAVTAYMRARWGLTKDRDAGDKHHAADAVVVACIGDSLIQRVTKYDKFKRNALADRNRYVQQVSKSEGITQYVDKETGEVFTWESFDERKFLPNEPLEPWPFFRDELLARLSDDPSKNIRAIGLLTYSETEQIDPIFVSRMPTRKVTGAAHKETIRSPRIVKVDDNKGTEIQVVVSKVALTELKLTKDGEIKDYFRPEDDPRLYNTLRERLVQFGGDAKAAFKEPVYKISKDGSVRTPVRKVKIQEKLTLGVPVHGGRGIAENGGMVRIDVFAKGGKYYFVPIYVADVLKRELPNRLATAHKPYSEWRVVDDSYQFKFSLYPNDAVMIKPSREVDITYKDRKEPVGCRIMYFVSANIASASISLRTHDNSGELEGLGIQGLEVFEKYVVGPLGDTHPVYKERRMPFRVERKMN

SEQ ID NO: 55 - protein, 1052 aa, Aminomonas paucivorans
  source 1..1052: note = DSM 12260
MIGEHVRGGCLFDDHWTPNWGAFRLPNTVRTFTKAENPKDGSSLAEPRRQARGLRRRLRRKTQRLEDLRRLLAKEGVLSLSDLETLFRETPAKDPYQLRAEGLDRPLSFPEWVRVLYHITKHRGFQSNRRNPVEDGQERSRQEEEGKLLSGVGENERLLREGGYRTAGEMLARDPKFQDHRRNRAGDYSHTLSRSLLLEEARRLFQSQRTLGNPHASSNLEEAFLHLVAFQNPFASGEDIRNKAGHCSLEPDQIRAPRRSASAETFMLLQKTGNLRLIHRRTGEERPLTDKEREQIHLLAWKQEKVTHKTLRRHLEIPEEWLFTGLPYHRSGDKAEEKLFVHLAGIHEIRKALDKGPDPAVWDTLRSRRDLLDSIADTLTFYKNEDEILPRLESLGLSPENARALAPLSFSGTAHLSLSALGKLLPHLEEGKSYTQARADAGYAAPPPDRHPKLPPLEEADWRNPVVFRALTQTRKVVNALVRRYGPPWCIHLETARELSQPAKVRRRIETEQQANEKKKQQAEREFLDIVGTAPGPGDLLKMRLWREQGGFCPYCEEYLNPTRLAEPGYAEMDHILPYSRSLDNGWHNRVLVHGKDNRDKGNRTPFEAFGGDTARWDRLVAWVQASHLSAPKKRNLLREDFGEEAERELKDRNLTDTRFITKTAATLLRDRLTFHPEAPKDPVMTLNGRLTAFLRKQWGLHKNRKNGDLHHALDAAVLAVASRSFVYRLSSHNAAWGELPRGREAENGFSLPYPAFRSEVLARLCPTREEILLRLDQGGVGYDEAFRNGLRPVFVSRAPSRRLRGKAHMETLRSPKWKDHPEGPRTASRIPLKDLNLEKLERMVGKDRDRKLYEALRERLAAFGGNGKKAFVAPFRKPCRSGEGPLVRSLRIFDSGYSGVELRDGGEVYAVADHESMVRVDVYAKKNRFYLVPVYVADVARGIVKNRAIVAHKSEEEWDLVDGSFDFRFSLFPGDLVEIEKKDGAYLGYYKSCHRGDGRLLLDRHDRMPRESDCGTFYVSTRKDVLSMSKYQVDPLGEIRLVGSEKPPFVL

SEQ ID NO: 56 - protein, 1361 aa, Anaerococcus tetradius
  source 1..1361: note = ATCC 35098
MGNYYLGLDIGTNSVGWAVTDENYNIERFKKKNMWGIRLFDEAKTAESRRIHRQARRMRQRKIQRLNLLMELFDVEISKVDESFFIRKKESDLHYEDKSQDSRYALFNDKEFNDKDYHNKYPTIFHLIMDLIENDEKKDIRLLYLACHYLIKNRGHFIFEGQKFDVNSSLNNNINKLKSHLDQFYNICLDFDNDKLIEILVNQNLNISEKSKKIKELLRKTNLEVGIANLIAGGSIKLSNMFDDDELKNLDYNSLSFKNSNFDEGRELFEEVLEDRFELVEILKDIHDASVLETMLSSASISPDGGKYISSSMINSYNKHKRDLKLLKKIIKKYKKSEYDNIFRDENIKNNYLSYTRTGINKNKKVQAEDNTDSDGFYKYIVKILKDIKENDSDEDIKYILSEIDKKNFVPKQRTKENSVIPYQLREIELRKIIDNQSKYHKFLNEVDEKGISVKEKIISLLTFRIPYYIGPLNPSYNEEKNFTTSWVKRLAKGKVTPWNFEDMVDIDASREAFIENKLNKCSFLLDETVLPKDSLLYQEYMVLNELNNLKINGQSINTDLKKSIYEELFKKYKKVTRKRLISYIKEKENMSGDIVITGIDGDFKQGLKSYIAFKDIIGEKIDDDIYRKEVEKIIRDISLYGDDKSFIQKKIKNENKLDLSDDQISKIAKLKFKDWGRFSKKLLVGIKASDKNTGEIDNIIGFMRNYNYNIMQLMANVFTFKDEIEKLNSKYYTDEKINIDYLDDLYLSSPAKRMLWQSFQIVDEIKNIKNSDPKKIFIEMARSKEDKPTRKMSRKSRLEKLYTDSKKQFIKLFGPDEYDKLNNEIKNKSESDFRWDNLYLYYTQFGRCMYSLDPIDLEELSNKNLYDQDHIYPKSKIYDDSIENRVLVKKQLNLDKSNEYPIPDRVLNKDKNKLLAFWKMLNEKELIGDKKYARLIRKSPFTDEELGDFIARQLVETRQATKETANMLKRLCPDSKIVYVKAKNVSDFRRKFDILKCRSINDLHHAHDAYLNIVVGNVFDTKFTSNPLNFIKNNSKNRSYNLEKIYDYDVIRNEKIAWLAERKEENQDGSIATVLKNLSKNDIRVTRRTYIKCEDLFDENIVRKGNGKFPIKENNNKSDTNKYGGYSGIKNAYFVLLEDEKHNRILEAIPSFIYKKEKNGEKGSVINYLQNILGIKSAKILRDKIKIGSLLKIDKFPYNLAGKSGNGILISGGVQLILDKNTSKYIKKIENYKYKLDENKDYQINIFDKLSKEENIKLFDLFVDKFENSIYKNRVNIKLKEIKLARPKFEHLSIEEQIKTLTQMLILFGRENNAVNLEYIGLPKNTGKTKINKKINNKDIKIINQSITGLYETEEDLANI

SEQ ID NO: 57 - protein, 1552 aa, Anaerophaga sp.
  source 1..1552: note = HS1
MFSQRNNPYCELLQNVKQLYKEKFGKTNQVDNSIIYGFMKRILGLDLGTNSIGWALVENDENDRKGKIIGMGSRIIPMDMSELDNFNKGASISKTAERTRLRMTRRLRERHLLRRARLHRILNIMGFLPEHYRNSIDFIDKKGCFFEGQEPKIAYKPDKNSEQFCFLFTSSFHEMLEDFRKFQPELIQNRKKVPYDWTIYYLRKKALTQKISKEELAWIILNFNTKRGYYHLRGEDEDNQDNKKIKEFRALKVVNVTEREGANSSGKKWYDMELENGWVYSRQSNLPPNLEGKTIELIVSYTLDNNGNIKKDKNGKEKYSLSMPGEEDWNLVKIKTENDLKTSKKSVGEYIYDHLLKNPDQKIRGKLISTIERKFYKEELSRILKTQMNFYEELKNRELYQKCVEELYPNNKSHQQTLLQKDFIHLIVEDIIFYQRPLKSKRAFVNNCPLEYRVYVDKKSGELIKSGVKCIPKSHPLFQEFRLWQYVRNLRIYERERMVNGRLMVNVDVTNELLPDEEHIVRLFDLLNDRKSFKQDDVLRFVGIKSPKDRKRYSWNYPEDKELPGNETRHLILAWLKKVDGVPEDWLDPEKLKALWHLLYSVTDREEIIKGLHSFAKKYELPDTFVEHFKKIPRLEREYGSFSEKAIKKLLPLMRMGKYWKAEEIPADLLEKAQKIIDAEADDRISDEVREKLLHLKDISQLKGLPLWQASYLVYGRHSETGEVVKWRTSEDLEKYILQFKQHSLRNPVVEQVILEALRVVKDIWEHYGEGKEGFFNEIHVEIGRELKNPADKRKKITSQIQENENTNLRIKALLEELFNDPSVKNVRPYSPAQQEILRIYEDGVLNGQKEIPDDILKISKMARPSKSQLVKYKLWLEQKYRSPYTGEIIPLSQLFTSAYEIEHIIPQARYFDDSFSNKVICEAEVNREKGHQLAFEFITKRGGDEIELNFGKKVTILNVEEYQKFVKDHYGRSLRSLSKMRKLLMEDIPDDFIDRQLNDSRYISKVVRNLLSNIVRAEDENSLVSKHLITCTGGVTTRLKHEWGLNDVWNELITPRFVRLNKMGKEKFGEWINKKGKQVFQIQMPLELQKGFNKKRIDHRHHALDALVVACASRSHVNYLNNDSARANASETRYDLRNKLCYKDKTDSNGNYRWKFYKPWESFTEEAKNRLAGTVVSFKSNRRIMTRSSNRYFKWVDTSEGKKKKLVRQIKGDNQAIRKPLHKDTVLGKVSLRKEKKVSLSKAIDLWESIVDKPLKKRIQSLREQGYDKKLLLKYFKDRNNQFNGQDISRVNIYFFDNNLAARRVTLDASFNSEKRIDGITDSGIKKILYAHLQNEKYHGKKDEKGNEISPYELAFSPEGLEEMNANIKKLNGGKPHCPIYKVRLAETIGEKFKLGEKGNKNKKYVEAAKGTNLFFAVYVDEKGVRSFETIPFSVALERRKQKLAVVPEENENKEKLLFYLSPNDLVYVPDEDEKLIDYRQLSINPTRIYKMVSSSGTQCFFIPHFVASPIVQTMELGPNNKSERAWDGQMIKNVCYKLSVDRLGNVKIEK

SEQ ID NO: 58 - protein, 1515 aa, Anaerophaga thermohalophila
  source 1..1515: note = DSM 12881
MKRILGLDLGTNSIGWALVESDEEQKSGKIQGIGSRIIPMDQNELDNFNKGNTVSQTAERTRLRMVRRLRERHLLRRERLHRVLKEIGFLPEHYLEQIDFTEKPGGFLPGKEPKIAYKPDNFKDKYDFLFQDSYHEMLSDFQDKNPEFIQKRKKVPQDWTIYYLRKKALTAKITKEELAWIILNFNQKRGYYQLRGEDEDVAKNTKKEEFHALKVVKVKEREDSEGASGKWYDIELENGWVYPRQSNIRPDWEGKILELIVTYNLDKDGNIKTDKEGNEKRSFRMPNKDDWTLRKKRTENEIEKSGKTVGEYIYDNLLDAPDLKIRGKLVSTIERKYYRSELEQILTAQKKYHPELSNSELFNKCISNLYPNNDIHRKALLSKDFVHLIINDIIFYQRPLKSKRSTVSNCPLEYRVYVDKVTGEKKKVPLKCIPKSHPLYQEFRLWQYVKNLRLFEKERFENGRLLTNVDVTEQFLPDEDKYVELFEFLNGRKTFKQDDILKFAGIKSAKDRVKYYWNYPQEKEYPGNETRYLIESRLKKIENVPDEWLNYEKIEELWHLLYSVTDKVEIEKGLQSFAAKYQLPDLFVEVFKGFPRMEREYGAFSKKAIKKLLPLMRMGKYWKLENINPDLIEKVQKIIDGEADDNINDGIRERFSEINEMSDLRGMPLWKASYLVYGRHSEAAEVIRWRTSADLDQYIKDFKQHALRNPIVEQVVLEALRVVKDVWNYFGEGREKFFDEIHVEIGRDLKNPADKRQKIANQIQENENTNLRIKALLVELFNDPEVQNVRPYSPVQQQLLKIYEDGVLNAERDIPDDIQKISRMANPTRNQLIRYKLWLEQKYRSPYTGEIIPLNKLFTSEYEVEHIIPRARYFDDSFSNKIISEAEVNRKKDRMLAFEFIKKLGGSTIDLNYGKKVSVLTVEEYQQFVKDHYGINPHSRLKMQKLLMDEIPESFIERQLNDSRYISKMVRNLLSNIVREENENSPVAKQLITCSGSITNTLKQEWGLNDVWNTIITPRFERLNKMGEQKYGEWVNKEGKPVFQIQMPLELQKGFNKKRIDHRHHALDALIVASATRSHVNYLSNEAAKTNAKDTRFDLRNRLCYKEKRGQNRNFTWRFYKPWNTFTEDAKNALNDIVVSFKSNHRVINKSTNRYFKWENLPGGMKKKRLVRQEKGDNWAIRQSLHKDTVLGKVSLRKVKPVSLSVALDSWNNIVDKALKKKIRSLKDQGYDKKLMLKYFKDRRNEYNGENISRVNVYYFDEEMAARRVDLDTSFNSEKRIEGITDSGIKKIIYAHLKNEKYHGQKDDKGKDISPYELAFSPEGIAEMNANIKQLNGGKPHCPIYKVRLAEPVGEKFQLGETGNKTEKLVEVAKGTNLFFGVYANDEGVRSFATVPFYLAVEREKQGLPAVPQENENGDQLLFWLSPNDLVYVPSEEDAHFANPKQIELDNSRIYKMVSSTGTQCFFIPHFVATPIVQTIELGPNNKSERAWDGQMIKKVCYKLSVDRLGNVEIE

SEQ ID NO: 59 - protein, 1168 aa, Azospirillum lipoferum
MARPAFRAPRREHVNGWTPDPHRISKPFFILVSWHLLSRVVIDSSSGCFPGTSRDHTDKFAEWECAVQPYRLSFDLGTNSIGWGLLNLDRQGKPREIRALGSRIFSDGRDPQDKASLAVARRLARQMRRRRDRYLTRRTRLMGALVRFGLMPADPAARKRLEVAVDPYLARERATRERLEPFEIGRALFHLNQRRGYKPVRTATKPDEEAGKVKEAVERLEAAIAAAGAPTLGAWFAWRKTRGETLRARLAGKGKEAAYPFYPARRMLEAEFDTLWAEQARHHPDLLTAEAREILRHRIFHQRPLKPPPVGRCTLYPDDGRAPRALPSAQRLRLFQELASLRVIHLDLSERPLTPAERDRIVAFVQGRPPKAGRKPGKVQKSVPFEKLRGLLELPPGTGFSLESDKRPELLGDETGARIAPAFGPGWTALPLEEQDALVELLLTEAEPERAIAALTARWALDEATAAKLAGATLPDFHGRYGRRAVAELLPVLERETRGDPDGRVRPIRLDEAVKLLRGGKDHSDFSREGALLDALPYYGAVLERHVAFGTGNPADPEEKRVGRVANPTVHIALNQLRHLVNAILARHGRPEEIVIELARDLKRSAEDRRREDKRQADNQKRNEERKRLILSLGERPTPRNLLKLRLWEEQGPVENRRCPYSGETISMRMLLSEQVDIDHILPFSVSLDDSAANKVVCLREANRIKRNRSPWEAFGHDSERWAGILARAEALPKNKRWRFAPDALEKLEGEGGLRARHLNDTRHLSRLAVEYLRCVCPKVRVSPGRLTALLRRRWGIDAILAEADGPPPEVPAETLDPSPAEKNRADHRHHALDAVVIGCIDRSMVQRVQLAAASAEREAAAREDNIRRVLEGFKEEPWDGFRAELERRARTIVVSHRPEHGIGGALHKETAYGPVDPPEEGFNLVVRKPIDGLSKDEINSVRDPRLRRALIDRLAIRRRDANDPATALAKAAEDLAAQPASRGIRRVRVLKKESNPIRVEHGGNPSGPRSGGPFHKLLLAGEVHHVDVALRADGRRWVGHWVTLFEAHGGRGADGAAAPPRLGDGERFLMRLHKGDCLKLEHKGRVRVMQVVKLEPSSNSVVVVEPHQVKTDRSKHVKISCDQLRARGARRVTVDPLGRVRVHAPGARVGIGGDAGRTAMEPAEDIS

SEQ ID NO: 60 - protein, 1068 aa, Bacillus cereus
  source 1..1068: note = BAG4X12-1
MRYVLGLDIGIASCGWAVINQEKERIEDLGVRIFDKAENPKDGKSLAAPRRDARSTRRTLRRKKHRMQRIKILLVKQGLLFKTELNHLYESATEFDVWNLRLDALERKLHPKEFARVLIHLAKRRGFKSNRKETTLSENGQILESISENQQIMEQQNYRTVGEMILKDKKFENHKRNKDGTYIGTVTRQQLQDEIQMIFHTQRLYKNDYATEEFESSYLEIWASQRPYASKDQIEKMIGYCTLEPKEKRTPKASWSFQYFVALQTINNLRLISKDKIEELSFEEKKQIMNLALEKPIVKYIDIRKLLSIPNDFQFNSLSYSADTVDTTLENKRCIELKEYHSINKVYKQVYGKNTPNLLPIDYDTIAYGLTIFKDDKDILEYLQNKYVNAKGKPIKNLAKKTYDDTFIQALLNLNFTKMGHLSFKALKNIIPFLEEGLSYDKACEKAGYNFKGTSYTERTKYLPVIPQNTNPVVHRALSQTRKVINAIIKKYGSPNAIHIETARELSKTFQERKEIDSRYQDNSKKNEHAIHKLKELGNINPSGINIVKFKLWSEQDGRCMYSGKYIEPHRLFEEGYTEVDHILPYSRSLDDSYNNKILTLGTENQRKGNKTPYEYMGNTSIWDEFETRVQSNKKINFKKQQKLLLQNFSYAREQEFIERNLNDTRYATIYLTSLIQQHLIFSESSSKKKVRTVSGIITSHLRSRWGFNKDRKEGHIHHALDAVIVAVTSNHMIQRVTKYYKLKELNKNLQAKQLPFPEPWEGFRLELEARISPNTQQYLKGIHFKNYADVNLSDIKPIFVSRMPKRSITGELHQETIRKFLGYNEKGKVLTAIKTKLEDIPFDANGDFPMYGKETDLYTYNAIKERYLSHEKDKRKSFQEPLYKPTKSGEIGPLIKSIKIMDTRTIVNPVNQGKGVVYNSKIARTDVFKKEDKYYLIPIYTIDLLKNILPHKAITAGKGYEDWTTIDSSFTFLFSLFPNDLIQIVPSKNKTIKARTTVSKKEILLPSLTGYFKGVHSGTAGITVETHDGSVIANVGSKQLLLFEKYQVDVLGHYTKIKEEKRMGMAI

SEQ ID NO: 61 - protein, 1078 aa, Bacillus cereus
  source 1..1078: note = BAG4X2-1
MRYVLGLDIGIASCGWAVINQEKERIEDLGVRIFDKAENPKDGKSLAAPRRDARSTRRTLRRKKHRMQRIKVLLVKHGLLSKTELDHLYESATEVDVWNLRLDALERKLYPKEFARILIHLAKRRGFKSNRKETTLSENGQILESISENQQIMEKQNYRTVGEMILKDKKFENHKRNKNGTYVGTVTRQQLQDEIQMIFHAQRLYKNDYATEEFESSYLEIWASQRPYASKDQIEKMIGYCTLEPKEKRAPKASWSFQYFVALQTINNLRLISKDRIEELSFEEKKQIMNLALEKSIVKYIDIRKLLSVPNEFQFNSLSYSADTVDTAVESRKCIELKEYHSINKVYKQIYGENALNLLPKYYDTIAYGLTIFKDDKDILEYLQNKYVNAKGKPISNFANKTYDDTFIQALLNLNFTKMGHLSFKALKNIIPFLEEGLSYDKACEKAGYNFKGTSYTEQTKYLPVIPQNTNPVVHRALSQTRKVINAIIKKYGSPNAIHIETARELSKTFQERKEIDSMYQDNSKKNEHAIHKLKELGNINPSGINIVKFKLWNEQDGRCMYSGKYIEPHRLFEEGYTEVDHILPYSRSLDDSYNNKTLTLGTENQRKGNKIPYEYMGNTSIWNDFETRVQSNKKINKKKQQKLLLQHFSYAREQEFIERNLNDTRYATIYLSSLIQQHLIFSESSRKKKVHTVSGIITSHLRSRWGFNKDRKEGHIHHALDAVIVAVTSDHMIQRVTKYYKLKELNRNLQAKRMPFPEPWEGFRLELEARISPNTQQYLKGLRFKNYADVNLSEIKSIFVSRMPKHSITGELHQETIRKFIGYNEKGKVLTAIKTKLEDIPFDANGDFPMYGKESDLYTYNAIKERYLSHKKDKRKSFQEPLYKPTKSGGIGPLIKSIKIMDTRTIVNPVNQGKGVVYNSKIARTDVFKKEEKYYLIPIYTIDLMKNILPQKAITAGKGYEDWTTIDPSFTFLFSLFPNDLIQIVPSKNKTIKARTTVSKKEVLLPSLTGYFKGVHSGTAGITVETHDGSVIANVGSKQLLLIEKYQVDVLGNYTKIKEEKRIGLTTYNDNKKIAAC

SEQ ID NO: 62 - protein, 1069 aa, Bacillus cereus
  source 1..1069: note = Rock1-15
MNYDIGLRIGITSCGWSIINKDLERIEDLGVRVFEKAENPDGTASAAPRREARKSRRKHRRKKHRIERIKRLIVQHDLLSKKELDSLYLSPFNIDVWNLQVEALERKLDNREFARVLIHLVQRRGFQTIRKSVEIQEEGKLLENVSENERIMKVNGYKTVGEMFSKHEKFTHHKRNKDGSYTSVVTRSLLLKEIKTIFNSQRILGNVFSTQKLESDYLYIWGSQRPTLTYEQLMSMVGNCIYEKKEKRAPKTSWAFQYFSLLQKINKLKVSDDNTLRKLSKEERDIVIELAFKKKNVSFVDIRKALKLNDNTKFNHLTYSHVVETKKVEKATFIELKGYHLIKKQLKDRNVELTQELQPKDYDAIAAASTFFKNDIEFRDYLRNQYLDSNGKRKSNIANKVFEDKVIAAVFELNFSKVCHLSFKSLYKLIPHLEKGLDYKEAILCAGYNFRDENKRDKKLFLPVIQQETNPVVHRALTQARKVINAIIREYGSPNTIRFVVANDLAKTYKQRKELESTLKKNRAENEKIKTKLLSMGIINPTGMDIVKYKLWYEQSGICLYTGRQMELSSLFKPGYSIVNHIIPYNRSFDDTYHNRVLTLTETKYEKGNKIPFEYFGAEETCWNEYEKRVSTSKKIHDKKREKLLIRNFDIEYENEMISNNVFDTHYIGSYFEKYIDEHLQFKKSTKKQKVFSIHGNMVAHLHSRWGFNKNSREIYLNHAVDAAIVAVLTDQLIRNIADYYRRDNILEQKGSLKFPEPWKSFSIELEARISPQVRDLIKKLNLDSYLDVDILHIKPVFISKKPRRKVNGEAHKSTIRSLIGINEIGKTVTCIKTRLEDIPFDENGDFPMYGKDTDKYTYTAIKERYLEFNKDKEKAFSTPLYKLKRNGEPGNQIKSVKIIDTRNIVNKVNQGKGIAYNSNIIRVDVFSRDQKYYVVPIYLRDFIKGSLPNKIITAAKGFMQWPETDNSYTFLFSIFPNDLIKVVPKEGKFIKAKNENKENINLTEILGYFKGLDSSTGAFTLESHDGSLLARGIGTKNLLLIEKYQVDVLGRYNKVGNEERQDIKIQQN

SEQ ID NO: 63 - protein, 1088 aa, Bacillus smithii
  source 1..1088: note = 7_3_47FAA
MNYKMGLDIGIASVGWAVINLDLKRIEDLGVRIFDKAEHPQNGESLALPRRIARSARRRLRRRKHRLERIRRLLVSENVLTKEEMNLLFKQKKQIDVWQLRVDALERKLNNDELARVLLHLAKRRGFKSNRKSERNSKESSEFLKNIEENQSILAQYRSVGEMIVKDSKFAYHKRNKLDSYSNMIARDDLEREIKLIFEKQREFNNPVCTERLEEKYLNIWSSQRPFASKEDIEKKVGFCTFEPKEKRAPKATYTFQSFIVWEHINKLRLVSPDETRALTEIERNLLYKQAFSKNKMTYYDIRKLLNLSDDIHFKGLLYDPKSSLKQIENIRFLELDSYHKIRKCIENVYGKDGIRMFNETDIDTFGYALTIFKDDEDIVAYLQNEYITKNGKRVSNLANKVYDKSLIDELLNLSFSKFAHLSMKAIRNILPYMEQGEIYSKACELAGYNFTGPKKKEKALLLPVIPNIANPVVMRALTQSRKVVNAIIKKYGSPVSIHIELARDLSHSFDERKKIQKDQTENRKKNETAIKQLIEYELTKNPTGLDIVKFKLWSEQQGRCMYSLKPIELERLLEPGYVEVDHILPYSRSLDDSYANKVLVLTKENREKGNHTPVEYLGLGSERWKKFEKFVLANKQFSKKKKQNLLRLRYEETEEKEFKERNLNDTRYISKFFANFIKEHLKFADGDGGQKVYTINGKITAHLRSRWDFNKNREESDLHHAVDAVIVACATQGMIKKITEFYKAREQNKESAKKKEPIFPQPWPHFADELKARLSKFPQESIEAFALGNYDRKKLESLRPVFVSRMPKRSVTGAAHQETLRRCVGIDEQSGKIQTAVKTKLSDIKLDKDGHFPMYQKESDPRTYEAIRQRLLEHNNDPKKAFQEPLYKPKKNGEPGPVIRTVKIIDTKNKVVHLDGSKTVAYNSNIVRTDVFEKDGKYYCVPVYTMDIMKGTLPNKAIEANKPYSEWKEMTEEYTFQFSLFPNDLVRIVLPREKTIKTSTNEEIIIKDIFAYYKTIDSATGGLELISHDRNFSLRGVGSKTLKRFEKYQVDVLGNIHKVKGEKRVGLAAPTNQKKGKTVDSLQSVSD

SEQ ID NO: 64 - protein, 1069 aa, Bacillus thuringiensis
MNYDIGLRIGITSCGWSIINKDLERIEDLGVRVFEKAENPDGTASAAPRREARKSRRKHRRKKHRIERIKRLIVQHDLLSKKELDSLYLSPFNIDVWNLRVEALERKLDNREFARVLIHLVQRRGFQTIRKSVEIQEEGKLLENVSENERIMKVNGYKTVGEMFSKHEKFTHHKRNKDGSYTSVVTRSLLLKEIKTIFNSQRILGNVFSTQKLESDYLYIWGSQRPTLTYEQLMSMVGNCIYEKKEKRAPKTSWAFQYFSLLQKINKLKVSDDNTLRKLSKEERDIVIELAFKKKNVSFVDIRKALKLNDNTKFNHLTYSHVVETKKVEKATFIELKGYHLIKKQLKDRNVELTQELQPKDYDAIAAASTFFKNDIEFRDYLRNQYLDSNGKRKSNIANKVFEDKVIAAVFELNFSKVCHLSFKSLYKLIPHLEKGLDYKEAILCAGYNFRDENKRDKKLFLPVIQQETNPVVHRALTQARKVINAIIREYGSPNTIRFVVANDLAKTYKQRKELESTLKKNRAENEKIKTKLLSMGIINPTGMDIVKYKLWYEQSGICLYTGRQMELSSLFKPGYSIVNHIIPYNRSFDDTYHNRVLTLTETKYEKGNKIPFEYFGAEETCWNEYEKRVSTSKKIHDKKREKLLIRNFDIEYENEMISNNVFDTHYIGSYFEKYIDEHLQFKKSTKKQKVFSIHGNMVAHLHSRWGFNKNSREIYLNHAVDAAIVAVLTDQLIRNIADYYRRDNILEQKGSLKFPEPWKSFSIELEARISPQVRDLIKKLNLDSYLDVDILHIKPVFISKKPRRKVNGEAHKSTIRSLIGINEIGKTVTCIKTRLEDIPFDENGDFPMYGKDTDKYTYTAIKERYLEFNKDKEKAFSTPLYKLKRNGEPGNQIKSVKIIDTRNIVNKVNQGKGIAYNSNIIRVDVFSRDQKYYVVPIYLRDFIKGSLPNKIITAAKGFMQWPETDNSYTFLFSIFPNDLIKVVPKEGKFIKAKNENKENINLTEILGYFKGLDSSTGAFTLESHDGSLLARGIGTKNLLLIEKYQVDVLGRYNKVGNEERQDIKIQQN

SEQ ID NO: 65 - protein, 1509 aa, Bacteroides coprophilus
  source 1..1509: note = DSM 18228
MKKTLGLDLGTNSIGWAVINSNIDSEGKEKLVGISSCGSRIIPMDATTLGDFGKGNTKSPVAERTRLRGIRRLLERSLLRRERLHRVLSVMGFLPEHYASQLDRYGKFLPETEPKLAWYKDDSGRYQFLFQKSFHEMLEDFRQHQPELVAGEKKIPYDWTIYYLRKKALSQEITKEELAWILLNFNQKRGYYQLRGEEEQEENNKSVEYHALKVVSVEDSGERKGKDIWYNVTLENGWVYRRASNIPLDWTGKVKEFVVTTELDDAGNPKKDKEGNVKRSFRAPKEDDWGLLKTRTQAQIDESGKTVGTYIYESLLCMPNQKIRGKLVRTIERKYYKDELRQILVKQSEFHAALQDHNLLLSCIEELYPNNEAHRRLLSASSFIYFLIEDILFYQRPLKSQKGLIDNCPYESHIYKDKKDGSLHHVPLKCVSKSHPLFQEFRLWQFLSNLRIYQRERMMDGSLKLDVDVTREFLPSEEDYVKLFDWLNERKEISQKFLLAYKPFGLKKNEQANYRWNYVEDKSYPCNETRAEIKSRLSKAGVPEEFLTEEKEEALWHILYSISDKKELTKALGTFAAKNCLNESFVEVFAKIPPFESNYAAYSLKAIRKLLALMRMGKYWNEQAIDRQTRDRIEKILTGEYDETIRSRVREKAMLLTDISSFRGLPLWLACYIVYDRHSESKELVKWETPADIDHFLSKFKQNSLRNPIVEQVITESLRTVRDIWKQEGKIDEIHVELGREMKNPAKERARITAQVQENENTNLRIKALLAEFMNPEFEIENVHPYSPGQQEILRIYEDGVLSGIAEKDLPDDITAILKKFRENDVKKRPTTSEVLRYKLWLEQRYRSPYTGRVIPLGKLFTPAYEIEHVIPQSRYFDDSISNKVICESAVNKLKDNCLGYEFIKKHSGEMVELGNGETVPVFSVEEYERFVKESYFGNSKKMKKLLLEDIPDSFIERQLNDSRYISRVVTSLLSNLVCEEGEQDGLSKNVIVCTGGITDRLKKDWGVQEVWNRIILPRFLRLNEITGRTDFTSTSVNGHLLPALPLYLQKGFNKKRIDHRHHAMDAIVIACANRNIVNYLNNSSARKNSEISRYDLQRLLCEKVKTDANGNYKWILRKPWETFTQDVYAALTNIVVSFKQNLRVINRTTNYYQHYNEAGEKRMIPQTKGDRWAIRKPMHKDTVYGEVNLRKEKTLPLRDVVKNPSIVVDKSLKNKLYELLKSQYDLKAIAKYFETHQDVWADVNLKKIKVYYFTKETNERFFATRKSLDPSFDQKKIEEEVTDTGVQKILLHHLQQNNNDPDMAFSPDGIDRMNQNMTILNDGKWHQPIYKVRTYEKADKFAVGESGNKAKKFVEAAKGTNLFFAVYESVQEDEAIGKQVCKRTFATIPLNEVIKRKKQGLPAAPEDLNGNLPKFVLSPNDLVYLPTEEERNSSRIIQPLDRERIYKMVSSSGSQCFFIKVFVANSIWDKNEYSSLNKMERAITNEMIKEICVPIKIDRLGNVSLIQI

SEQ ID NO: 66 - protein, 1504 aa, Bacteroides coprosuis
  source 1..1504: note = DSM 18011
MKKVLGLDIGTNSVGWAVVNQNDKGEFLSIEKIGSRIIPMSQDVMDKFGAGQTESSTAQRTQYRGVRRLRERSLLRRERLHRVLHILHFLPQHYDAAIGWNKKENKTYGKFLPGVEVNIPWVATDQGHQFIFMDSYAEMLKDLKQHQPHLFEKSSTPVPLDWTIYYLRKKALTQAISKEELAWILLNFNQKRGYYQLRGEEVEDNTKREEFYALKVVKVELDKDNTSAKTWYKVHLENGFIYPCPSDTPIDSWVGMVKDFIVTTTLEKDGSEKRTADGEIKRSFRAPKEDDWTLLKKKTESELEKSGKQVGAFIYDTLLSNPDQKIIGGLIKTIERKYYKKELEQILETQQKFIAELSDKKLFQACAEELYPLNDSHRENLLERDFKHLFVQDIIFYHRPLKTKKSLISNCTYEYRTFYKNGEKQISPIKCIAKSNPLFQEFRVWQFVQNLRILQRQRSEGDSIKYNVDVTAEFLKDENDIANLFTWLNERKVIKQDQLLKSYFKLKVNKETKELDYRWNYVDDKNKEYPCNATRTHILSFLEKCKEEKRIEDDRFVYSLWHLLYSVVEPIELRGALAKFAEREHLHPSFVDVFAQFPPLEKEYGSYSEKAIKRLLPLMRMGDYWHEDKIDVKTKQRIQRIIDGEADDDITHRSREKVENLRSITDFKGLPLWKAGYVVYNRHSESGELTKWKTPHELSNYIQNEFKQYSLRNPIVEQIVLETLRVVHDLWVKHGDFSEIHLELGRDIKNSSDKRKRMAERQQENENSRQRVLEMLIDLKKEAAFADLNPYSPSQQEKLRIVEDGVLRSNIEIPKDIEKITKSAKPTSRELTKYRLWLDQKYRSPYTGQPISLAQLFTSKYEIEHVIPQAKYFDDSFTNKVICESEVNKEKGSMLAHEFILKNGGSTVNVGGRQVQVLKNDAYVELINRLYGKNNPVKAKKLLAEDIDEVVGDFSERQLNDTRYISRVVQKLLSNIVREEDEQESTSKHVIGCSGQVTTALKKDWGLNDIWNKIIQPRFERLNEMTATEDYGVWQSPNHFQIRVPEEIQKGFTKKRIDHRHHAMDALVIACATRSHINYISNRSGQDRNAKFETTRTDLRSKLCYKENSSGNNYNYIFNKPWDTFTQDAHRALENIVVSHKQNLRVLTKTNNYTQFINKDGKKDLQKQVKGDHFAVRKPMHQETIYGRVSIRSIKEVALKKALENWKQIVDRTLKDKIRELIGAYGKYDAQTILKYFKDRDYKFNNLKINRVEVYEYDHNCAAVRKSIGDDLTIKQIERITDESIRKILMNHLSNYDDNLKEAFSPEGLMEMNKNIKELNGGKNHQPIYKVRLFEDLGSKFPLGVSHNNPDKYAIAAKGTNLFFGIYEDQEGKRMFDSIPLNIVIDRLKEKKSPVPETYNESKLKFHLSPNDLVYVPTDEEQKQPELVDVDHLSDEQKGRVYKAVSFTGNRAFFVNHRVSKVIHDYVEFGTKNKIENDDDKRSLKHICWKLKVNRLGEITDVKR

SEQ ID NO: 67 - protein, 1504 aa, Bacteroides dorei
  source 1..1504: note = DSM 17855
MKNIVGLDLGTNSIGWAVVNGSVNDDGSEQLVKIQASGSRIIPMDAAMIGDFNKGNSISQTAERTRLRGVRRLSERYLLRRERLHRILDILGFLPFHFAQDLDRHGKIVKGKEPKLAWRKNEAGQFEFIFQDSFKEMLEDFKLNYPNLITDDKKVPYDWTIYYLRKKGLTSKISKEELAWILLNFNQKRGYYQLRGEEEEENKDKLVEFYALKVVAVEDSGEKKGKDIWYNVHLENGWVYRRTSNMSLDWVGKTKEFIVTTDLEKDGTPKKDKEGNVKRSFRAPKEDDWSLVKKKTEADIDQTHKTVGAYIYDTLLGNPSQKIRGRLVRTIERKYYKEELKLILEKQKEFHLELQDRALYAACIEELYPINEAHRNNVGNRDFTYLFLEDILFYQRPLKSKKSLIDNCPYEENQGLDKETGEIKSFPVKCIAKSHPLFQEFRLWQFIINLRIYRKDLAQDVDVTNELLKTEEDYVALFDWLNGKKEIDQKAFLKYPVFGLKKEIENYRWNYVQDKPYPCNETRSLMLARLEKCDISIEFLTKENEEALWHILYSVEDKNEIVKALQKFADKHDLNASFVDVFQKFPPFKKEYGSYSAKAIKKLLPLMRMGKYWSENSIDKGTRERIDKIITGEYDEKIENRVREKAIHLADVSDFKGLPLWLVCYIVYGRHSEAKEIIQWKSPADIDSYLRSFKQHSLRNPIVEQIIIETLRVVRDIWKQVGNIDEIHVELGREMKNPADKRKKMTQQMSENENTNLRIKYLLTEFLNPEYEVENVRPYSPSQQDILRIYEEGVLNSVSDLPEEISDILKKFTETDLKKRPSRSEVLRYKLWLEQKYRSPYTGEVIPLGKLFTPAYEIEHVIPQSYYFDDSFSNKVICEAEVNKLKSNLLGHEFIVKHHGEIVELPFGKKVRIFTVDEYEQFVKDNYSRTRSKMKKLLMDDIPEEFVTRQLNDSRYISKVVKSLLSNIVREKGEEEAISKNVIPCTGGVTDRLKKDWGINEVWNKIILPRFQRLNELTGTNKFTTKNVGIQEIPTMPLELQKGFNKKRIDHRHHAMDAIIIACANRNIINYLNNKSATAKAELSRYDLQKMLCDKAKTDNNGNYKWVIRKPWASFTQDTYLALENIIVSFKQNLRVINKATNRFLHYNEEGKKIFVKQGKGDNWAIRKSMHKDTVFGEVNLRRIKTVALNEAMKNPQSIVVKDFKRKLLELWNLGFDAKRIKKYFEDNRETWSDINLSKIEVYYFSKDTKDRFFATRKPLDTSFDRKKIENNITDTGIQKILLRHLELKDNNPDIAFSPDGIDEMNRNIIQLNNGKYHQPIIKIRWYEQADKFAVGQTGNKSSKFVEAAKGTNLFFAVYESNILDKKTNTIIKKRNYATIPLNVAIERQKQGLPVAPEDENGNDPIFVLSPNDLVYLPTDDELANGIIAQPLDRGRIYKMVSSSGEQCFFIKHIVANVLVDKFEFSPLNKMERALTGEMIKMICIPIKVDRLGNVLESSSSYKK

SEQ ID NO: 68 - protein, 1509 aa, Bacteroides eggerthii
  source 1..1509: note = 1_2_48FAA
MKTILGLDLGTNSVGWAVINSVIKEQAERIWIEMAGSRIIPMDAAVLGDFDKGNSISQTSERTRLRGARRLRERQLLRRERLHKVLNILGFLPNHYLEYIDFEKHPGKFLADAEPKLAWVKDEQGKYTFLFQAAFDEMLADFAIHQPSLVSGDKKIPYDWTIYYLRKKALTEMISKEELAWILLNFNQKRGYYQLRGEEEEDNAGKSVEFYALKVLTVEATDEKKGRDVWYNVHLENGWIYRRSSSVPLDWEGQVKEFIVTTDLNPDGTPKLDKYGEVKRSFRAPKEDDWMLIKKRTEADIANTHKTVGAYIYDTLLQKPQQKIIGKLVKTVERKLYRDELSLILQKQCAFHAELQDRALYARCVEALYPSNEVRRKNIANRDFVYLLMDDILFYQRPLKTKKSLIANCPYEENEYVDRETGEIKKTPLKCIAKSHPLFQEFRLWNFLSNIRIYQKEKEINGTLHLDVDVTAEFLKTEDDYVALFDWLNSRKEIEQKTFLKYPKFGLKKEISNYRWNYVEDKQYPCNETRHAILSSLEKANVCIDFLSNEKEVALWHILYSVSDKQEIEKALRTFAAKNGLDESFVEAFKKFPPFKSEYGAYSAKAIKKMLPLMRCGKYWDVSSIDDTTKERIKKIVTGEYDERISVKVRDKVMNLSDISCFRRLPLWLACYIVYNRHSEDKEAVKWESPADIDAYLASFKQHSLRNPIVEQVITETLRVVRDIWKQVGRIDEIHIELGREMKNPADKRKRMTAQILENENANLRIKALLAEFMNPEYEIENVRPYSPSQQEILRIYEDTVLHAEDQLPEEIDAILKKFNSSKVPTKSEFLRYKLWLEQKYRSPYTGELIPLGKLFTAAYEIEHVIPQSRYFDDSFSNKVICESAVNKLKDNQLGYEFIKNHHGQKVEVGFGKSVEIFSVDSYERFVKEQYAKSAVKMKKLLMDDIPEQFIERQLNDSRYISKVIKGLLSNIVREKNDSGEYEPEAVSKNIVVCTGSVTDRLKRDWGMNDVWNSIVYPRFERLNSLTDTQSFGHWENKSGKKVFQTELPLEYQKGFSKKRIDHRHHAMDAIVIACATRNHVNYLSNESASRNAKISRYDLQRLLCDKNRTDDNGNYKWVIKKPWDTFTQDAREVLSKIVVSLKQNLRIINKTTNVYRHLDATGNRVYEKQKTGDSWAIRKPMHKDTVFGAVNLRKVKVVRLSVALDTPAMIVDKRVKNKVFELLSYKYDKKRIEKYFKENAFLWKELDLAKVAVYYFTEATTEPLVAVRKPLDSTFNEKKIKESVTDTGIQKILLNHLCTKEGKPDLAFSAEGIEEMNRNLLQLNNGKSHQPIYKVRVYEPRGNKFSVGVLGNKGTKWVEAAKGTNLFFAIYITEDGKRTYETIPLNVVIEREKQGLVPVPDRNKKGDKLLFWLSPNDLVYLPTEEEREFGRINEPIDRGRIYKMVSCTGNEGHFIPANVANPIVPVIELGSNNKAQRAWTNEMIKDICIPIKVDRLGHIIEVKYRIDE

SEQ ID NO: 69 - protein, 1526 aa, Bacteroides faecis
  source 1..1526: note = MAJ27
MKKILGLDLGTNSIGWAVLNAADDNSLKYIEAAGSRIIPMDAAILGDFDRGNSISQTAERTRIRGMRHLRERYLLRRARLHRILNLLGFLPFHYAQDIDRYGNFSADMEPKIAWCKNLEGELEFIFIESFNEMLEDFRKNQPELVADNKKVPYDWVIYYLRKKALEKKISKEELAWILLNFNQKRGYYQLRGEDDDESMKTAKTRQYFDKQIIKNIIDTNQTYKGQRILIVELQNGDKGKIFKKEIPDWIGQEKNIIVTVDIDKDGNDKYEESGSLSCRFKIPTDAEWESEWKLIKMKTQKDLDESNKTVGTYIYDSILQNPTQKVRGKLVRTIERKYYKAELKQILEKQTEFHSELQDKDLYIECLNELYSNNDTHRNAITDRDFVYLFMNDILFYQRPLKSKKSLIDNCPYERNIYIDKETGEIKYSPIKCIAKSHPLFQEFRLWKFISSIRIYQRESVVEVVDKQLDLFSSQSTSVQKLVTDVDVTDKFLTCENDYVALFEWLNKKKIIDQKEFLKYRPFGLKGDIDNYRWNYVEDKSYPCNETHAMILTYFAKAGISEDILTKEMEEALWHILYSVEDRQEITKALRTFASKYHLSDSFVKVFSNIPPFKKEYGSYSAKAIKKLLSLMRMGKYWSEDAIDVNTRERIDKIVTGEYDEKIRDRVREKTIRLNDIRHFRALPDWLACYVVYDRHSETREITEWKSPEEIDEYIRNFKQHSLRNPIVEQVITETLRTVRDIWKQVGCIDEIHVELGREMKNPADKRKRITSQIIENENANLRVKALLTEFVNSEFEIENVRPYSLSQQDILRIYEDGVLNSVAEVPGDIAGILKKFNENDAKKRPTTSEILRYKLWLEQKYRSPYTGEMIPLSKLFTSAYEIEHVIPQSRYFDDSFSNKVICEAEVNKLKDNALGYEFIKKHHGEKVELGFGKIVEIFSVSVYEQFVKDNYSRNRGKMKKLLMDEIPEQFIERQLNDSRYISKVVKTLLSNVVREKAEQEAVSKNVIVCTGGVTDRLKKDWGINDVWNKIVLPRFLRLNELTNSTNFTAKNAAGNEIPAMPLELQKGFNKKRIDHRHHAMDAIVIACANRNIVNYLNNESASRKAKISRHDLQAILCDKVRTDDKGNYQWRVKKPWDTFTQDVYVALENIIVSFKQNLRVINKTSNYYWHYENGKKVLVKQVKGDSWAIRKPMHKDTVFGEVNLRKVKSVSLNEALKNPQFIVEKDLKRQLLSLLQQNFDIKKIKKYFEEHKDIWSDISLSKMNIYYFTKETKDRYFATRKPLDASFDKKKIESCITDTGIQQILLRHLELKENDPERAFSPDGIDEMNRNIIQLNKGKGHHPIAKVRVYEKADKFEVGQRGNKSSKFVEAAKGTNLFFAVYETEYPDEKTNSIVRKRNYATIPLNIAIERQKRGLSTAPEDEKGNVPSFVLSPNDLVYLPTSEDIVNGHITQPIDKSRIYKMVSSSGSQCFFIKHNIANIIVDKYEFSPLNKMERAISNEMIKEICIPVKVDRLGNIVKLGKSE

SEQ ID NO: 70 - protein, 1509 aa, Bacteroides fluxus
  source 1..1509: note = YIT 12057
MKTILGLDLGTNSVGWAVINSVIKEQAERIWIEMAGSRIIPMDAAVLGDFDKGNSISQTSERTRLRGVRRLRERQLLRRERLHKVLNILGFLPNHYLEYIDFEKHPGKFLSDAEPKLPWVKDEQGKYTFLFQAAFDEMLADFAIHQPSLVSGDKKIPYDWTIYYLRKKALTEMISKEELAWILLNFNQKRGYYQLRGEEEEDNAGKSVEFYALKVLTVEATDEKKGRDVWYNVHLENGWIYRRSSSVPLDWEGQIKEFIVTTDLNPDSTPKLDKYGEVKRSFRAPKEDDWMLIKKRTEADIANTHKTVGAYIYDTLLQKPQQKIIGKLVKTVERKLYRDELSLILQKQCAFHAELQDRTLYARCVEALYPNNEVQRRNIANRDFVYLLMDDVLFYQRPLKTKKSLIANCPYEENEYVDRETGEIKKAPLKCIAKSHPLFQEFRLWNFLSNIRIYQKEKEINGTLHLDVDVTAEFLKTEDDYVALFDWLNSRKEIEQKTFLKYPKFGLKKEISNYRWNYVEDKQYPCNETRHAILSRLEKANVCIDFLSNEKEVALWHILYSVSDKQEIEKALRTFAAKNGLDESFVEAFKKFPPFKSEYGAYSAKAIKKLLPLMRCGKYWDVSSIDDTTKERIKKIVAGEYDERIAVKVRDKVMNLSDISCFKRLPLWLACYIVYNRHSEDKEAVKWESPADIDAYLASFKQHSLRNPIVEQVITETLRVVRDIWKQVGRIDEIHIELGREMKNPADKRKRMTAQILENENANLRIKALLAEFMNPEYEIENVRPYSPSQQEILRIYEDMVLHAEDQLPEEIDAILKKFNSSKVPTKSEFLRYKLWLEQKYRSPYTGELIPLGKLFTAAYEIEHVIPQSRYFDDSFSNKVICESAVNKLKDNQLGYEFIKNHHGQKVEVGFGKSVEIFSVDSYERFVKEQYAKSAVKMKKMLMDDIPEQFIERQLNDSRYISKVIKGLLSNIVREKNDSGEYEPEAVSKNIVVCTGSVTDRLKRDWGMNDVWNSIVYPRFERLNSLTDTQSFGHWENKSGKKVFQTELPLEYQKGFSKKRIDHRHHAMDAIVIACATRNHVNYLSNESASRNAKISRYDLQRLLCDKSRTDDNGNYKWVIKKPWDTFTQDAREVLSKIVVSLKQNLRIINKTTNVYRHLDATGNRVYEKQKTGDSWAIRKPMHKDTVFGAVNLRKVKVVRLSVALDAPTMIVDKRVKNKVFELLSYKYDKKRIEKYFKENAVLWKELDLARVAVYYFTEATTEPLVAVRKPLDSTFNEKKIKESVTDTGIQKILLNHLCTKEGKPDLAFSAEGIEEMNRNLLQLNNGKRHQPIYKVRVYEPRGNKFSVGVLGNKGTKWVEAAKGTNLFFAIYITEDGKRTYETIPLNMVIEREKQGLAPVPDKNEKGDKLLFWLSPNDLVYLPTEEELEFGRINEPIDRGRIYKMVSSSGNQCFFIPQSISNAIIPTKELGANNKAERSWDGAMIKNICIPVKVDRLGRIIEVKYRINE

SEQ ID NO: 71 - protein, 1436 aa, Bacteroides fragilis
MKRILGLDLGTNSIGWALVNEAENKDERSSIVKLGVRVNPLTVDELTNFEKGKSITTNADRTLKRGMRRNLQRYKLRRETLTEVLKEHKLITEDTILSENGNRTTFETYRLRAKAVTEEISLEEFARVLLMINKKRGYKSSRKAKGVEEGTLIDGMDIARELYNNNLTPGELCLQLLDAGKKFLPDFYRSDLQNELDRIWEKQKEYYPEILTDVLKEELRGKKRDAVWAICAKYFVWKENYTEWNKEKGKTEQQEREHKLEGIYSKRKRDEAKRENLQWRVNGLKEKLSLEQLVIVFQEMNTQINNSSGYLGAISDRSKELYFNKQTVGQYQMEMLDKNPNASLRNMVFYRQDYLDEFNMLWEKQAVYHKELTEELKKEIRDIIIFYQRRLKSQKGLIGFCEFESRQIEVDIDGKKKIKTVGNRVISRSSPLFQEFKIWQILNNIEVTVVGKKRKRRKLKENYSALFEELNDAEQLELNGSRRLCQEEKELLAQELFIRDKMTKSEVLKLLFDNPQELDLNFKTIDGNKTGYALFQAYSKMIEMSGHEPVDFKKPVEKVVEYIKAVFDLLNWNTDILGFNSNEELDNQSYYKLWHLLYSFEGDNTPTGNGRLIQKMTELYGFEKEYATILANVSFQDDYGSLSAKAIHKILPHLKEGNRYDVACVYAGYRHSESSLTREEIANKVLKDRLMLLPKNSLHNPVVEKILNQMVNVINVIIDIYGKPDEIRVELARELKKNAKEREELTKSIAQTTKAHEEYKTLLQTEFGLTNVSRTDILRYKLYKELESCGYKTLYSNTYISREKLFSKEFDIEHIIPQARLFDDSFSNKTLEARSVNIEKGNKTAYDFVKEKFGESGADNSLEHYLNNIEDLFKSGKISKTKYNKLKMAEQDIPDGFIERDLRNTQYIAKKALSMLNEISHRVVATSGSVTDKLREDWQLIDVMKELNWEKYKALGLVEYFEDRDGRQIGRIKDWTKRNDHRHHAMDALTVAFTKDVFIQYFNNKNASLDPNANEHAIKNKYFQNGRAIAPMPLREFRAEAKKHLENTLISIKAKNKVITGNINKTRKKGGVNKNMQQTPRGQLHLETIYGSGKQYLTKEEKVNASFDMRKIGTVSKLAYRDALLKRLYENDNDPKKAFAGKNSLDKQPIWLDKEQMRKVPEKVKIVTLEAIYTIRKEISPDLKVDKVIDVGVRKILIDRLNEYGNDAKKAFSNLDENPIWLNKEKGISIKRVTISGISNAQSLHVKKDKDGKPILDENGRNIPVDFVNTGNNHHVAVYYRPVIDKRGQLVVDEAGNPKYELEEVVVSFFEAVTRANLGQPIIDKDYKTTEGWQFLFSMKQNEYFVFPNEKTGFNPKEIDLLDVENYGLISPNLFRVQKFSLKNYVFRHHLETTIKDTSSILRGITWIDFRSSKGLDTIVKVRVNHIGQIVSVGEY

SEQ ID NO: 72 - protein, 1436 aa, Bacteroides sp.
MKRILGLDLGTNSIGWALVNEAENKDERSSIVKLGVRVNPLTVDELTNFEKGKSITTNADRTLKRGMRRNLQRYKLRRETLTEVLKEHKLITEDTILSENGNRTTFETYRLRAKAVTEEISLEEFARVLLMINKKRGYKSSRKAKGVEEGTLIDGMDIARELYNNNLTPGELCLQLLDAGKKFLPDFYRSDLQNELDRIWEKQKEYYPEILTDVLKEELRGKKRDAVWAICAKYFVWKENYTEWNKEKGKTEQQEREHKLEGIYSKRKRDEAKRENLQWRVNGLKEKLSLEQLVIVFQEMNTQINNSSGYLGAISDRSKELYFNKQTVGQYQMEMLDKNPNASLRNMVFYRQDYLDEFNMLWEKQAVYHKELTEELKKEIRDIIIFYQRRLKSQKGLIGFCEFESRQIEVDIDGKKKIKTVGNRVISRSSPLFQEFKIWQILNNIEVTVVGKKRKRRKLKENYSALFEELNDAEQLELNGSRRLCQEEKELLAQELFIRDKMTKSEVLKLLFDNPQELDLNFKTIDGNKTGYALFQAYSKMIEMSGHEPVDFKKPVEKVVEYIKAVFDLLNWNTDILGFNSNEELDNQPYYKLWHLLYSFEGDNTPTGNGRLIQKMTELYGFEKEYATILANVSFQDDYGSLSAKAIHKILPHLKEGNRYDVACVYAGYRHSESSLTREEIANKVLKDRLMLLPKNSLHNPVVEKILNQMVNVINVIIDIYGKPDEIRVELARELKKNAKEREELTKSIAQTTKAHEEYKTLLQTEFGLTNVSRTDILRYKLYKELESCGYKTLYSNTYISREKLFSKEFDIEHIIPQARLFDDSFSNKTLEARSVNIEKGNKTAYDFVKEKFGESGADNSLEHYLNNIEDLFKSGKISKTKYNKLKMAEQDIPDGFIERDLRNTQYIAKKALSMLNEISHRVVATSGSVTDKLREDWQLIDVMKELNWEKYKALGLVEYFEDRDGRQIGRIKDWTKRNDHRHHAMDALTVAFTKDVFIQYFNNKNASLDPNANEHAIKNKYFQNGRAIAPMPLREFRAEAKKHLENTLISIKAKNKVITGNINKTRKKGGVNKNMQQTPRGQLHLETIYGSGKQYLTKEEKVNASFDMRKIGTVSKSAYRDALLKRLYENDNDPKKAFAGKNSLDKQPIWLDKEQMRKVPEKVKIVTLEAIYTIRKEISPDLKVDKVIDVGVRKILIDRLNEYGNDAKKAFSNLDKNPIWLNKEKGISIKRVTISGISNAQSLHVKKDKDGKPILDENGRNIPVDFVNTGNNHHVAVYYRPVIDKRGQLVVDEAGNPKYELEEVVVSFFEAVTRANLGLPIIDKDYKTTEGWQFLFSMKQNEYFVFPNEKTGFNPKEIDLLDVENYGLISPNLFRVQKFSLKNYVFRHHLETTIKDTSSILRGITWIDFRSSKGLDTIVKVRVNHIGQIVSVGEY

SEQ ID NO: 73 - protein, 1512 aa, Bacteroides nordii
  source 1..1512: note = CL02T12C05
MKNILGLDLGTNSIGWAVINSEEDGPIVKKRIELAGSRIIPMDAAVLGNFDSGVTKSQTAERTSFRSIRRLRERQLLRRERLHKVLQILGFLPEHYVNDIDFENHPGKIKRNTEPKLPWRKNSMGQFEFIFQDSFEAMLTDFATHQPVFVSEGKKVPYDWTLYYLRKKALTEGISKEELAWLILNFNQKRGYYQLRGEEEEEQSNKLVEFYALRVVKVEATDDKKGKDTWYNVHLENGWIYRRTSNIPLDWEGKVKEFIVTTDLNEDGTPKLDKYGEVKRSFRAPKEDDWTLIKKKTESDIANSHKTVGCYIYDALLQNPHQKIKGRLVRTVERKFYKEELRLILEKQLSFHPELQDRDLYRACIDALYVSNEAHKNNISGRDFVYLFIDDIIFYQRPLKTKKSLIDNCPYEENQYMDRETGEVKQAPIKCIAKSHPLFQEFRLWQFISNIRIYQRERVLDDGKLETDVDVTPDFLKTEDDYTTLFEWFNDRKEVDQKAFLKNPQFGLKKTFTEYRWNYVEDKSYPCNETRNAILNGLQKAGVSADFLSREVEEALWHILYSVEDKIEIESALRKFASKHDLDDRFADVFKKLPPFKKEYGAYSAKAIKKLLPLMRIGKYWELSNIDDKTKERIDKIITGEWDENIHDRVREKAIKLSDITDFKGLPLWLSCYVVYNRHSEARAIAKWESPEDIDSYLRLFRQHSLRNPIVEQVITETLRTVRDIWKRVGQIDEIHVELGREIKNPADKRAKMTAQIVENENTNLRIKALLAEFINSEYEIENVRPYSSNQQEKLKIYEDTVLNGVKEIPEDINTILKKFRESDLKKRPTKSDFLHYKLWLEQKYCSPYTGRIIPLGKLFTSAYEIEHIIPQAHYFDDSFSNKVICEAEVNGLKDKKLGYEFIKHNPGKMVEIGFGKPPVRIFSVEEYERFVKENYSGIKNKMNKLLMDDIPETFIERQLNDSRYISKVVKSLLSNIVREKDSNGEYEPEAISKNVIVCTGSVTDRLKRDWGVNDVWNSIIYPRFERLNELTGSQQFGCWENKEGKRVFQTAVPLEMQKGFSKKRIDHRHHAMDAIVIACATRNHINYLSNESASKKAKISRTDLQRLLCTKCRTDDNGNYKWIVKKPWPAFTQDIRKALENITVSFKQNLRVINKTTNYYVHFDESGKKVLEKQINGDSWAIRKPMHKDTVFGKVNLQKVKEVRLSLALDTPKMIVDKKLKEKVLQLYSYKYDKKRIDKYFKENASLWKDLNLSKVAVYYFTNDSTEPLVAVRKPLDTSFNAKKIKESVTDTGIQKILLNHLSNNQDDPNLAFSPDGIDKMNKNLTALNDGKYHQPIYKVRVCEPQGNKFSVGTSGNKTSKYVEAAKGTNLFFAVYQTEDGKRSYETIPLNVVIEREKLGWTPVPENNNNGDKLLFWLSPNDLVYVPTADELNNGMRLDNMDKGRIYKMISCSGPQCFFIPQNVSNAIIPVIELGANNKAEKSWNNEMIKVVCVPIRVDRLGCITQINNQK

SEQ ID NO: 74 - protein, 1436 aa, Bacteroides sp.
  source 1..1436: note = 2_1_16
MKRILGLDLGTNSIGWALVNEAENKDERSSIVKLGVRVNPLTVDELTNFEKGKSITTNADRTLKRGMRRNLQRYKLRRETLTEVLKEHKLITEDTILSENGNRTTFETYRLRAKAVTEEISLEEFARVLLMINKKRGYKSSRKAKGVEEGTLIDGMDIARELYNNNLTPGELCLQLLDAGKKFLPDFYRSDLQNELDRIWEKQKEYYPEILTDVLKEELRGKKRDAVWAICAKYFVWKETYTEWNKEKGKTEQQEREHKLEGIYSKRKRDEAKRENLQWRVNGLKEKLSLEQLVIVFQEMNTQINNSSGYLGAISDRSKELYFNKQTVGQYQMEMLDKNPNASLRNMVFYRQDYLDEFNMLWEKQAVYHKELTEELKKEIRDIIIFYQRRLKSQKGLIGFCEFESRQIEVDIDGKKKIKTVGNRVISRSSPLFQEFKIWQILNNIEVTVVGKKRKRRKLKENYSAIFEELNDAEQLELNGSRRLCQEEKELLAQELFVRDKMTKSEVLKLLFDNPQELDLNFKTIDGNKTGYALFQAYSKMIEMSGHEPVDFKKPVEKVVEYIKAVFDLLNWNTDILGFNSNEELDNQSYYKLWHLLYSFEGDNTPTGNGRLIQKMTELYGFEKEYATILANVSFQDDYGSLSAKAIHKILPHLKEGNRYDVACVYAGYRHSESSLTREEIANKVLKDRLMLLPKNSLHNPVVEKILNQMVNVINVIIDIYGKPDEIRVELARELKKNAKEREELTKSIAQTTKANEEYKTLLQTEFGLTNVSRTDILRYKLYKELESCGYKTLYSNTYISREKLFSKEFDIEHIIPQARLFDDSFSNKTLEARSVNIEKGNKTAYDFVKEKFGESGADNSLEHYLNNIEDLFKSGKISKTKYNKLKMAEQDIPDGFIERDLRNTQYIAKKALSMLNEISHRVVATSGSVTDKLREDWQLIDVMKELNWEKYKALGLVEYFEDRDGRQIGRIKDWTKRNDHRHHAMDALTVAFTKDVFIQYFNNKNASLDPNANEHAIKNKYFQNGRAIAPMPLREFRAEAKKHLENTLISIKAKNKVITGNINKTRKKGGVNKNMQQTPRGQLHLETIYGSGKQYLTKEEKVNASFDMRKIETVSKSAYRDALLKRLYENDNDPKKAFAGKNSLDKQPIWLDKEQMRKVPEKVKIVTLEAIYTIRKEISPDLKVDKVIDVGVRKILIDRLNEYGNDAKKAFSNLDKNPIWLNKEKGISIKRVTISGISNAQSLHVKKDKDGKPILDENGRNIPVDFVNTGNNHHVAVYYRPVIDKRGQLVVDEAGNPKYELEEVVVSFFEAVTRANLGLPIIDKDYKTTEGWQFLFSMKQNEYFVFPNEKIGFNPKEIDLLDVENYGLISPNLFRVQKFSLKNYVFRHHLETTIKDTSSILRGITWIDFRSSKGLDTIVKVRVNHIGQIVSVGEY

SEQ ID NO: 75 - protein, 1517 aa, Bacteroides sp.
  source 1..1517: note = 20_3
MKKIVGLDLGTNSIGWALINAYINKEHLYGIEACGSRIIPMDAAILGNFDKGNSISQTADRTSYRGIRRLRERHLLRRERLHRILDLLGFLPKHYSDSLNRYGKFLNDIECKLPWVKDETGSYKFIFQESFKEMLANFTEHHPILIANNKKVPYDWTIYYLRKKALTQKISKEELAWILLNFNQKRGYYQLRGEEEETPNKLVEYYSLKVEKVEDSGERKGKDTWYNVHLENGMIYRRTSNIPLDWEGKTKEFIVTTDLEADGSPKKDKEGNIKRSFRAPKDDDWTLIKKKTEADIDKIKMTVGAYIYDTLLQKPDQKIRGKLVRTIERKYYKNELYQILKTQSEFHEELRDKQLYIACLNELYPNNEPRRNSISTRDFCHLFIEDIIFYQRPLKSKKSLIDNCPYEENRYIDKESGEIKHASIKCIAKSHPLYQEFRLWQFIVNLRIYRKETDVDVTQELLPTEADYVTLFEWLNEKKEIDQKAFFKYPPFGFKKTTSNYRWNYVEDKPYPCNETHAQIIARLGKAHIPKAFLSKEKEETLWHILYSIEDKQEIEKALHSFANKNNLSEEFIEQFKNFPPFKKEYGSYSAKAIKKLLPLMRMGKYWSIENIDNGTRIRINKIIDGEYDENIRERVRQKAINLTDITHFRALPLWLACYLVYDRHSEVKDIVKWKTPKDIDLYLKSFKQHSLRNPIVEQVITETLRTVRDIWQQVGHIDEIHIELGREMKNPADKRARMSQQMIKNENTNLRIKALLTEFLNPEFGIENVRPYSPSQQDLLRIYEEGVLNSILELPEDIGIILGKFNQTDTLKRPTRSEILRYKLWLEQKYRSPYTGEMIPLSKLFTPAYEIEHIIPQSRYFDDSLSNKVICESEINKLKDRSLGYEFIKNHHGEKVELAFDKPVEVLSVEAYEKLVHESYSHNRSKMKKLLMEDIPDQFIERQLNDSRYISKVVKSLLSNIVREENEQEAISKNVIPCTGGITDRLKKDWGINDVWNKIVLPRFIRLNELTESTRFTSINTNNTMIPSMPLELQKGFNKKRIDHRHHAMDAIIIACANRNIVNYLNNVSASKNTKITRRDLQTLLCHKDKTDNNGNYKWVIDKPWETFTQDTLTALQKITVSFKQNLRVINKTTNHYQHYENGKKIVSNQSKGDSWAIRKSMHKETVHGEVNLRMIKTVSFNEALKKPQAIVEMDLKKKILAMLELGYDTKRIKNYFEENKDTWQDINPSKIKVYYFTKETKDRYFAVRKPIDTSFDKKKIKESITDTGIQQIMLRHLETKDNDPTLAFSPDGIDEMNRNILILNKGKKHQPIYKVRVYEKAEKFTVGQKGNKRTKFVEAAKGTNLFFAIYETEEIDKDTKKVIRKRSYSTIPLNVVIERQKQGLSSAPEDENGNLPKYILSPNDLVYVPTQEEINKGEVVMPIDRDRIYKMVDSSGITANFIPASTANLIFALPKATAEIYCNGENCIQNEYGIGSPQSKNQKAITGEMVKEICFPIKVDRLGNIIQVGSCILTN

SEQ ID NO: 76 - protein, 1424 aa, Bacteroides sp.
  source 1..1424: note = 3_1_19
MKRILGLDLGTNSIGWALVNEAETDEEVSSIIRLGVRVNPLTVDETQNFEKGKSITTNAERTLKRSMRRNLQRYKLRRDALVEFLKELGFITDETILSEQGNRTTFETCRLRAKAAEEEISLEELSRVLLMINKKRGYKSSRKVKKEEDGVLIDGMEIAKKLYEEDLTPGQLCSQLLESGKKVLPDFYHSDLQEELDRIWSVQKQFHPDVFCDAAKEEIKGKNRSQTWAILANYFVWKEEVVGWNDREAKNETIEKECKLVGLKRTTKGYELKKENYRWRAQALTEQLGLEEIAVVLQEINGQINASSGYLGAISDRSKVLYFNHQTVGQYQMAELDKNPHASLRNMVFYRQDYLDEFDRIWEKQAEFHKELTAELKKEIRDMIIFYQRRLKSQKGLISFCEFERLEIVVEKDGKKQTKVIGCKVIPRSHPLFQEFKVWQTLNDIKVLGREKKRNALSASESRALYPEEKEILARELAIKENMKKADVLKLLFENPQELDLNFKQIDGNRTGFSLFSAYSKMIEKYGYEPLDFKKPADEIIGQLRTIFTDLGWNTNLFTIDLTKEGKELEMQPYFRLWHLLYSFEGDNTSTGNGKLIEKIMQLCGVEKEYAVELASLSFQDDYGSLSAKAIKRILPYLKEGNLYDVACEYAGYRHSKSSLTKEEIENKVLKGKLEVLPKNSLRNPVVEKILSQMVNVINTIIDTYGKPDEIRVELARELKKSAKEREELTKAIAKSTREHEEIRKLLQDEFGMMNVSRNDIIRYKLYEELKDNGYKTLYSNQYIPKEKIFSKEIDIEHIIPQSRLFDDSLSNKTLEYKAINIEKGNKTAYDFVKEKYGEEGLQQYINRCESLFNDKKAKLRKLKMEQKDIPDGFIDRDLRNTQYIAKKALAMLNEICRRVVATTGSITDQLREDWQLVDVMKELNLPKYEALGFVETYEDKDGRKIKRIKDWTKRNDHRHHAMDALTVAFTKDAFIQYFNNKNAAQDSGNRNHTNIIGIKTRYFDKGRALPPIPLEQFRIEAKQHLEKLLVSIKAKNKVVTVNVNRTKKRKGENTKIQQTPRGQLHLETVYGSHKQYVTKIEKVNASFDAAKIATVSKRAYRNALLKRLETFGNDPKKAFTGKNALEKNPLYADKYQTIRVPEKVQTVEFETIYTIRKPVDPALNVDKVVDVKVRAILERRLKEYGGDPKKAFVNFWENPIWLNKEKGISIKRVSIRGINNAQSIHVKKDKNGNPIWDENGKQIPVDFVNTGNNHHVAIYRKPVLDKKGQVTFDEDGNLMYELDEVVVPFFEAVTRANLGLPIIDKDYRKSEGWQFLFSMKQNEYFVFPNEKTGFNPKEVDLLNPDNYAMISPNLFRVQTMSKVMYGNNVVRDYKFRHHLETTVKDMKELKDIAYKQYKTLSFGNSVVKIRINHIGQIVSVGEY

SEQ ID NO: 77 - protein, 1510 aa, Bacteroides sp.
  source 1..1510: note = D2
MKRILGLDLGTNSIGWALVDSEEQRILGMGSRIIPMDQGVLDTFSGGNPVETQTAARTAYRGTRRLRERALLRRERLIRVLNMMKFLPEHYASQIDFEKRLGQFFDEKEPKLAWKQNDEGRFEFIFQQSFNEMIEEFKNKGVVREDKKIPYDWTIYYLRKKALSQEIEKEELAWILLNFNQKRGYYQLRGEEEEENPNKLVEYYSLKIVDVIADEKPNSKGDIWYSLHLENGWIYRRSSKIPLFGWKDKTRDFIVTTDLNDDGTVKKDKEGIEKRSFRAPSENDWVLLKKKTESDIEKSHKTVGAYVYETLLQNPMQKVRGKLVRTIERKFYKDELKQILEKQREFHPELRDEDLYNDCVRELYRSNETYQFILSKRDFVHLFLDDILFYQRPLRSQKSAIGDCILEFKTYKDKDGNNIKEYLKVISKSNPLYQEFRIWQWLYNLKIYRKEDDEDVTLQFIANIEDKEQLFDFLSNRKSIEQKPLLEYLIKAKGLKKQVKTEAYRWNYVEDKIYPCSETKTMISTRLAKVENIPDNFFTKEIEQKLWHIIYSVTDKNEFEKALRTFAKKYDLDIASFVDNFKKIPPFKNEYGSFSEKAIKKLLPLMRLGKYWKWNDIDNNTQNRISKIITGEYDEEIKDIVREKSIALTNENDFQGLQLWLAQYLVYGRHSEADIAGKWHSVADLEKYLNEFKQHSLRNPIVEQIITETLRVVRDIWRKYGQGAENFFSEIHVELGRDMKNTADERKKIVNVVTENENTNLRIKALLMELKNNSDGKLEVENVRPYSPTQQDILKIYEEYAISTGLDNEKDEKVKEDIKKISRVAQPTTTELQRYKLWLEQKYCSPYTGKVIPLGKLFTEEYQIEHIIPKSRYYDDSFSNKVICEAAVNKLKDKCLGLEFIKNYHGQIVETGFGQKVTIFDEEAYQNFVKQHYAYNRSKRTKLLLEEIPEKMIERQMNDTRYISKFVLPLLSNLVRAEENDNGVNSKNVLPVNGKITTMLKQDWGLNDVWNDLILPRFVRMNELAKTIAFTSWNEQHQKYLPTVPLELSKGFQKKRIDHRHHAMDALVIACATRDHVNLLNNKHANTDTIRYDLQRKLRLFERVTYIDPQTKNNVTKDIPKEFKKPWDNFTVDARNELEKIIVSFKQNLRIINKATNIYTKYENGKKIKVGQKGLNWAIRKPLHKETVFAKVSLRKRKTVRLSEALKDWKKIVDKKLKQEIKRLTCQYGKFDVDTILRYFKDRKYQFGEVDVSKVKMYYFDEENAAVRKNVDTSFTEKFIQGSVTDTGIQKILLNHLEAKGNKVEIAFSPEGIEEMNKNIIQLNEGKLHLPIFKVRVYETIGNKFSVGVKGNKKDKYVEAAKGTNLFFAIYVDENGIRSYETIPLNIVIERLKQGLSVVPEKNRKEHSLLFYLSPNDLVYVPIEDERENIHAVNLDQLNNEQRKRIYKMVSCTGSECHFVPYYVASPIVNKVEYSSLNKIGRSLTGEMIKDVCIKLKVDRLGNVKGISGL

SEQ ID NO: 78 - protein, 1436 aa, Bacteroides sp.
  source 1..1436: note = D2
MKRILGLDLGTNSIGWALVDEAENKDERSSIVKLGVRVNPLTVDELTNFEKGKSITTNADRTLKRGMRRNLQRYKLRRETLMEVLKEHKLITEDTILSENGNRTTFETYRLRAKAATEKISLEEFARVLLMINKKRGYKSCRKAKGAEEGTLIDGMDIARELYNNNLTPGELCLQLLDAGKKYLPDFYRSDLQNELDRIWEKQKEYYPEILTEVLKEELRGKKRDAVWAICAKSFVWEEYYTEWNKEKGKTEQQEREHKLEGIYSKRKRDEAKRENLQWRVNGLKEKLSLEQLVIVLQEMNIQINNSSGYLGAISDRSKELYFNKQTVGQYQMEMLDKNPNASLRNMVFYRQDYLDEFNTLWEKQAEYHKELTGELKKEIRDIVIFYQRRLKSQKGLVGFCEFESRQIEVEIDGKKKIKTVGNRVIPRSSPLFQEFKIWQILNNIEVTVVGKKGKRRKQKDNSPTLFDGLDDTEQLELNGSRYLYQEEKELLAQELFVRDKMTKSDVLKLLFDNPQELDLNFKTIDGNKTGYTLFQAYSKMIEMSGHEPVDFKKTVEKVVEHVKAVFDLLNWNTDILGFNSNEELDNQSYYKLWHLLYSFEGDNTPTGNARLVQKITELYGFEKEYAIILANVTFQDDYGSLSAKAIHKILPHLKEGNRYDVACAYAGYKHSESSLTKEEIANKALKDRLTLLPKNNLRNPVVEKILNQMVNVINAIIDTYGKPDEIRVELARELKKNAKEREELTKFIAETTRKHEEFKILLQSEFGLTNVSRTDILRYKLYKELESCGYKTLYSNTYIPREKLFSKEFDIEHIIPQARLFDDSFSNKTLEARSINLEKGNKTAYDFVKEKFGESGADNSLDHYLNNIEDLFKSGKISKTKYNKLKMAEQDIPDGFINRDLRNTQYIAKKALSMLNEISRRVVATSGTITDKLRQDWQLVDVMKELNWEKYKALGLVEYFEDKDGRQIGRIKDWTKRNDHRHHAMDALTVAFTKDIFIQYFNNKNASLNSNTNEYAIKNKYFQNGRAIAPIPLREFRVEAKKHLENTLISIKAKNKVVTGNINKTKKRGGVNKYLQQTPRGQLHLETIYGSGKQYLTKEEKVNASFDMKKIATVSKSAYRDVLLKRLHENDNDPKKAFTGKNSLDKQPIWLDKEQTRKVPEKVKTVTLETIYTVRKEISPDLKVDKVIDAGVRKILTGRLNEYGNDAKKAFSNLDENPIWLNKEKGISIKRVTISGISNAQSLHVKKDKDGKPILDEDSRNIPVDFVNTGNNHHVAVYRRPVIDKRGQLVIDEAGNPKYELEEVVVSFFEAVTRANLGQPIIDKDYKTSEGWQFLFSMKQNEYFVFPNEKTGFNPKEIDLLDAENYGVISPNLFRVQKFAHKNYVFRHHLETTIKDTSSILKGITWIDFRSSKGLDAIVKVRVNHIGQIVSVGEY

SEQ ID NO: 79 - protein, 1508 aa, Bacteroides uniformis
  source 1..1508: note = CL03T00C23
MRTILGLDLGTNSIGWAVINSVIKEQTERIWIEMAGSRIIPMDAAILGDFDKGNSISQTAERTRFRGVRRLRERQLLRRERLHKVLKILGFLPEHYLKGIDFEKHTGKFLSGSEPKLPWVKDRWGKYSFLFQTAFNEMLADFAKHQPSLVFDGKKIPYDWTVYYLRKKALTEMISKEELAWILLNFNQKRGYYQLRGEEEEDNAGKSVEFYALKVLSVEATDEKKGRDIWYNVHLENGWVYRRSSNVPLDWEGRVKEFIVTTDLNPDGTPKLDKYGEVKRSFRAPKEDDWMLIKKRTEADITGTHKTIGSYIYDALLQEPQQKIIGKLVKTVERKFYKEELNFILQKQCAFHAELQDRDLYMRCIEALYPGNEVQRRNIANRDFIYLLIDDVLFYQRPLKTKKSLIANCPYEENEYVNRKTGEIKTAPLKCIAKSHPLFQEFRLWYFLSNIRVYQKEREVNGTLHLDVDVTTEFLKTEDDYVALFDWLNSRKEIDQKAFLRYPAFGLKKEINNYRWNYVEDKFYPCNETRHAILSRLEKAGIGIDFLSDEKETALWHILYSVSDKQEIEKALATFAVKNGLNESFVEVFKKFPPFKSEYGAYSAKAIKKLLPLMRCGKYWDMSLIDGTTKERIERIIAGECDESIGAKVREKAMNLSDISCFKRLPLWLACYVVYNRHSEDKEITKWETPADIDAYLAAFKQHSLRNPIVEQVITETLRVVRDIWKQVGKIDEIRIELGREMKNPADKRKRMTTQILENENANLRIKALLAEFVNPEYGVENVRPYSPSQQEILRIYEDAVLKGEEQIPEDIDVILKKFNTSKLPTKSEFLRYKLWLEQKYRSPYTGELIPLAKLFTAAYEIEHVIPQSRYFDDSFSNKVICESAVNKLKDNQLGYEFIKNHHGQKVEVGFGKTVEIFSVDSYERFVKEQYAKSGIKMKKLLMDDIPEQFIERQLNDSRYISKVVKGLLSNIVREKNDSGEYEPEAVSKNILVCTGSVTDRLKKDWGMNDVWNSIVSPRFERLNALTETQCFGHWENKDGKKVFQTAVPLEYQKGFSKKRIDHRHHAMDAIVIACATRNHVNYLNNESASRNAKISRYDLQRLLCDKSRGDGNGNYRWIIKKPWTTFTQDAREALSGIIVSLKQNLRIINKTTNIYQHFDANGTRVYEKQKIGDSWAIRKPMHKDTVFGAVNLRKVKVVRLSVALDTPSMIVNKRVKNKVLELLSYKYDKKKIEKYFKENAFLWKELDIAKVAVYYFTENTTEPLVAVRKSLDSTFNEKKIASVTDTGIQKILLNHLKSKEGKAELAFSAEGIEEMNRNLLQLNDGKGHQPIYKVRVYEPRGNKFKVGVLGNKGAKWVEAAKGTNLFFAIYITEDGNRTYETIPLNWVIEREKQGLVPVPDRNEKGDKLLFWLSPNDLVYLPTEEERDFGRINEPIDRGRIYKMVSSSGNQCFFIPQSISNAIISTKELGSNNKAEKSWDGEMIKNICIPVKVDRLGRIIEVKYRVNE

SEQ ID NO: 80 - protein, 1504 aa, Bacteroides vulgatus
  source 1..1504: note = CL09T03C04
MKNIVGLDLGTNSIGWAVVNGSVNDDGSEQLVKIQASGSRIIPMDAAMIGDFNKGNSISQTAERTRLRGVRRLSERYLLRRERLHRILDILGFLPFHFAQDLDRHGKIVKGKEPKLAWRKNEAGQFEFIFQDSFKEMLEDFKLNHPNLITDDKKVPYDWTIYYLRKKGLTSKISKEELAWILLNFNQKRGYYQLRGEEEEENKNKLVEFYALKVVAVEDSGEKKGKDIWYNVHLENGWVYRRTSNMPLDWVGKTKEFIVTTDLEKDGTPKKDKEGNVKRSFRAPKEDDWSLLKKKTEADIDQTHKTVGVYIYDTLLGNPSQKIRGRLVRTIERKYYKEELKQILEKQKEFHLELQDRALYAACIEELYPINEAHRNNVGNRDFTYLFLEDILFYQRPLKSKKSLIDNCPYEENQGLDKETGEIKSFPVKCIAKSHPLFQEFRLWQFIVNLRIYRKDLAQDVDVTNELLKTEEDYVALFDWLNGKKEIDQKAFLKYPVFGLKKEIENYRWNYVQDKPYPCNETRSLMLARLEKCDISIEFLTKENEEALWHILYSVEDKNEIVKALQKFADKHDLNASFVDVFQKFPPFKKEYGSYSAKAIKKLLPLMRMGKYWSENSIDKGTRERIDKIITGEYDEKIENRVREKAIHLADVSDFKGLPLWLVCYIVYGRHSEAKEITQWKSPADIDSYLRSFKQHSLRNPIVEQIIIETLRVVRDIWKQVGNIDEIHVELGREMKNPADKRKKMTQQMSENENTNLRIKYLLTEFLNPEYEVENVRPYSPSQQDILRIYEEGVLNSVSDLPEEISDILKKFTETDLKKRPSRSEILRYKLWLEQKYRSPYTGEVIPLGKLFTPAYEIEHVIPQSCYFDDSFSNKVICEAEVNKLKSNLLGHEFIVKHHGEIVELPFGKKVRIFTVDEYEQFVKDNYSRTRSKMKKLLMDDIPEEFVTRQLNDSRYISKVVKSLLSNIVREKGEEEAISKNVIPCTGGVTDRLKKDWGINEVWNKIILPRFQRLNELTGTNKFTTKNVGIQEIPTMPLELQKGFNKKRIDHRHHAMDAIIIACANRNIINYLNNESATAKAELSRYDLQKMLCDKAKTDNNGNYKWVIRKPWASFTQDTYLALENIIVSFKQNLRVINKATNRFLHYNEEGKKIFVKQGKGDNWAIRKSMHKDTVFGEVNLRRIKTVALNEAMKNPQSIVVKDFKRKLLELWNLGFDAKRIKKYFEDNRETWSDINLSKIEVYYFSKDTKDRFFATRKPLDTSFDRKKIENNITDTGIQKILLRHLELKDNNPDIAFSPDGIDEMNRNIIQLNNGKYHQPIIKIRWYEQADKFAVGQTGNKFSKFVEAAKGTNLFFAVYESNILDKKTNTIIKKRNYATIPLNVAIERQKQGLPVAPEDENGNDPIFVLSPNDLVYLPTDDELANGIIAQPLDRGRIYKMVSCTGNEGHFIPARIANPILQTIELGSNNKAQKAWTDEMIKEICMPIKVDRLGNVLESSSSYKK

SEQ ID NO: 81 - protein, 1434 aa, Bacteroidetes sp.
  source 1..1434: note = oral taxon 274 str. F0058
MKNILGLDLGTNSIGWAYVKQAQNDSEKSEIAELGVRVNPLTVDEKTNFEKGKPISTNADRTLKRGARRNLQRYKLRRQELIELLKDYQVISDKTILAEDGKETTFETLRLRVKSAKEQVSLEELARILLMINKKRGYKSSRKAKNEDEGQLIDGMEIARRLYDENLTTGQLSLQLLKEGKKSLPDYYRSDLQHELDKVWNFQKQFHPDILTDEFYTSIQGKGQKATRESFSSKYGIDTAENKGSREEKKLQAYQWRADATHKELTKEELAFVITEINNNINNSSGYLGAISDRSKELIFANETVGEYLWKQIQNDPHTSLKNQVFYRQDYFDEFERIWETQSGFYPQILTESLKNELRDILIFYQRKLKSQKALVSICEFESKEIPLKDKQGNPISKNGIPVTKLVGPKVAPKSSPLFQEFKIWQNLNNVLVRPKGSRKRKVTTNQQSTLLEGQEPVFELNLEQKELLFEELNLKGNLKTDYCLELIGYSAKEWEMNYPTLEGNKTNKALYEAYLKIIDSEGYDAKKLLKVKTDKDDINLDDIKVSASEIKTMISDIFNELGINTKILDFDAELERKQFEAQASYRLWHLLYSYEGDDSKSGNELLYRLLEDKFGFKREHSKTLANVSLLSDYGNLSTKAIRTIYPYIKENKFSTACELAGYRHSKLSISKEENENRTLKDTLDVLKKNSLRQPVVEKILNQMINLINELIEKHSEKDEKGNIVKYFKFDEIHIELARELKKNAEERRELDSKVREGKDRNEKIITILKSEFGLPYPTKNDITRYRLYEELKDNGYKDLYTNTYIPREKLFSKEIDIEHIIPKSRLFNDSFSNKTICYRQDNLNKGERTAYDYIEGLGKTQLDEYLNRVENLYTNKFITKAKYRNLLKKESEIGDGFIERDLRETQYIAKKAKEMLLQITRHVVSTTGSITDRLRDDWELVNVMRELNLPKYKVLGLTEIQERKNGQTVEVITDWTKRNDHRHHAMDALTVAFTKHSHIQYLNFLNARKDEKHKEYSNIMGIQQLETEKTTDKDGKDRRVFKTPIPNFRQVAKEHLESILISHKTKNKVVTRATNKIAGSKKQQETLSPRGQLHKETVYGKYRRYVQKEEKIGSKFDLQTIERVANPLYKRLLTKRLEENGGDPKKAFTGKNALAKSPIYLDETQTQQLPEKVKLVWLETDFSIRKDITPDNFKDEKSIDKVLDEGIKRILKDRLKSFDGDAKRAFTDLEQNPIWLNKEKGIAIKRVTISGVSNAEPLHTKKDHLGNEIFDDTGKPIPVDYVSTGNNHHIAIYRDENGNLQEKAVSFFEAVTRANQGLPTVDKTYNQHLGWQFLFTMKQNEMFVFPNKETGFDPQEIDLLDPKNKKLISPNLFRVQKISTKNYFFRHHLETSVETHNALNGVTYKSQLGLNGITDIIKVRINHLGDIVHIGEY

SEQ ID NO: 82 - protein, 1153 aa, Barnesiella intestinihominis
  source 1..1153: note = YIT 11860
MKNILGLDLGLSSIGWSVIRENSEEQELVAMGSRVVSLTAAELSSFTQGNGVSINSQRTQKRTQRKGYDRYQLRRTLLRNKLDTLGMLPDDSLSYLPKLQLWGLRAKAVTQRIELNELGRVLLHLNQKRGYKSIKSDFSGDKKITDYVKTVKTRYDELKEMRLTIGELFFRRLTENAFFRCKEQVYPRQAYVEEFDCIMNCQRKFYPDILTDETIRCIRDEIIYYQRPLKSCKYLVSRCEFEKRFYLNAAGKKTEAGPKVSPRTSPLFQVCRLWESINNIVVKDRRNEIVFISAEQRAALFDFLNTHEKLKGSDLLKLLGLSKTYGYRLGEQFKTGIQGNKTRVEIERALGNYPDKKRLLQFNLQEESSSMVNTETGEIIPMISLSFEQEPLYRLWHVLYSIDDREQLQSVLRQKFGIDDDEVLERLSAIDLVKAGFGNKSSKAIRRILPFLQLGMNYAEACEAAGYNHSNNYTKAENEARALLDRLPAIKKNELRQPVVEKILNQMVNVVNALMEKYGRFDEIRVELARELKQSKEERSNTYKSINKNQRENEQIAKRIVEYGVPTRSRIQKYKMWEESKHCCIYCGQPVDVGDFLRGFDVEVEHIIPKSLYFDDSFANKVCSCRSCNKEKNNRTAYDYMKSKGEKALSDYVERVNTMYTNNQISKTKWQNLLTPVDKISIDFIDRQLRESQYIARKAKEILTSICYNVTATSGSVTSFLRHVWGWDTVLHDLNFDRYKKVGLTEVIEVNHRGSVIRREQIKDWSKRFDHRHHAIDALTIACTKQAYIQRLNNLRAEEGPDFNKMSLERYIQSQPHFSVAQVREAVDRILVSFRAGKRAVTPGKRYIRKNRKRISVQSVLIPRGALSEESVYGVIHVWEKDEQGHVIQKQRAVMKYPITSINREMLDKEKVVDKRIHRILSGRLAQYNDNPKEAFAKPVYIDKECRIPIRTVRCFAKPAINTLVPLKKDDKGNPVAWVNPGNNHHVAIYRDEDGKYKERTVTFWEAVDRCRVGIPAIVTQPDTIWDNILQRNDISENVLESLPDVKWQFVLSLQQNEMFILGMNEEDYRYAMDQQDYALLNKYLYRVQKLSKSDYSFRYHTETSVEDKYDGKPNLKLSMQMGKLKRVSIKSLLGLNPHKVHISVLGEIKEIS

SEQ ID NO: 83 - protein, 1352 aa, Belliella baltica
MKKILGLDLGTTSIGWAFIKEPEKDVVGSEIVDMGVRIVPLSSDEENDFAKGNTISINADRTLKRGARRNLQRFKQRRNALLEIFKEKKLISTNFKYAEDGPSSTFSTLNLRAKAAKEKIELQDLVKVLLQINKKRGYKSSRKAKSEEDDGSAIDSMGIAKELYENDLTPGQWVYEALQKGRKNVPDFYRSDLQEEFKKIVNYQSEFFPDIFNASFVEDWMGKASTPTKQYFNKKGVQLAENKGKREERRLQEYKWRAEAVNFKIDLSEIALILSQINSQISNSSGYLGAISDRSKELYFKNLTVGQYLYQQIKKNPHTRLKGQVFYRQDYLDEFERIWSVQSSFYPQLNDALKREVRDITIFFQRRLKSQKHLISNCEFEDHHKVVPKSHPVFQEFRIWQNLNNLLLIKKDNLNEKFDLELESKIALANELAFKRELNVKDALKILGLKPNEWEFNFTKIEGNRTNQAFFDAFAKIIELEDGEPIDLGDLKADDILDQFSEAFLRIGIDTELLQVNSDIEGAEYEKQSYIQFWHLLYSSEDDQKLKLNLIRKFGFKPEHAKILASISLQDDHASLSSRAIKKILPHLQSGLIYDKACTYAGYNHSSSFTKDENEKRELRAELELLKKNSLRNPVVEKILNQMINVVNAILKDPELGRPDEIRVEMARELKANAEQRKNMTSNIASATRDHDKYREILKSEFGLKRVTKNDLLRYKLWLETDGISLYTGKPIEASKLFSKEYDIEHIIPKARLFDDSFSNKTICERQLNIDKANVTAFSFLQNKLSADEFEQYQSRVKSLYGKLSKAKIQKLLMANDKIPEDFIARQLQETRYISKKAKEILFEISRRVSVTTGTITDKLREDWGLVEIMKELNWEKYDKLGLTYTIEGKHGERLNKIKDWSKRNDHRHHAMDALTVALTKPAYIQYLNNLNAKGLNNKKGTEVFAIEQKYLKRENGKLCFIPPIENIRSEAKKHLSRILVSYKAKNKVVTINKNKTKSKAGLNEQIALTPRGQLHKETVYGKSFHYSTKFEKIGASFNVQKINTVAKKEEREALLKRLAENGNDPKKAFTGKNTLNKMPIYLDLGKNIKLSEKVKTVVLEQNYTIRKNIDPDLKVDKVIDVGIKRILESRLEEFGGNAKLAFSNLEENPIWLNKEKGISIKRVKISGVSNVESLHVKKDHFGEPILDQEGNEIPVDFVSTGNNHHVAIYEDENGNLQEEVVSFFEAVVRQNQGLPIIKKNHTLGWKFLFTLKQNEYFVFPSDDFVPADVDLMDEQNYHLISPNLFRVQKIARKNYVFNNHLETKAVDNDLLKSKKELSKITYHFYQTPEHLRGIIKIRINHLGKIIQIGEY

SEQ ID NO: 84 - protein, 1415 aa, Bergeyella zoohelcum
  source 1..1415: note = ATCC 43767
MKHILGLDLGTNSIGWALIERNIEEKYGKIIGMGSRIVPMGAELSKFEQGQAQTKNADRRTNRGARRLNKRYKQRRNKLIYILQKLDMLPSQIKLKEDFSDPNKIDKITILPISKKQEQLTAFDLVSLRVKALTEKVGLEDLGKIIYKYNQLRGYAGGSLEPEKEDIFDEEQSKDKKNKSFIAFSKIVFLGEPQEEIFKNKKLNRRAIIVETEEGNFEGSTFLENIKVGDSLELLINISASKSGDTITIKLPNKTNWRKKMENIENQLKEKSKEMGREFYISEFLLELLKENRWAKIRNNTILRARYESEFEAIWNEQVKHYPFLENLDKKTLIEIVSFIFPGEKESQKKYRELGLEKGLKYIIKNQVVFYQRELKDQSHLISDCRYEPNEKAIAKSHPVFQEYKVWEQINKLIVNTKIEAGTNRKGEKKYKYIDRPIPTALKEWIFEELQNKKEITFSAIFKKLKAEFDLREGIDFLNGMSPKDKLKGNETKLQLQKSLGELWDVLGLDSINRQIELWNILYNEKGNEYDLTSDRTSKVLEFINKYGNNIVDDNAEETAIRISKIKFARAYSSLSLKAVERILPLVRAGKYFNNDFSQQLQSKILKLLNENVEDPFAKAAQTYLDNNQSVLSEGGVGNSIATILVYDKHTAKEYSHDELYKSYKEINLLKQGDLRNPLVEQIINEALVLIRDIWKNYGIKPNEIRVELARDLKNSAKERATIHKRNKDNQTINNKIKETLVKNKKELSLANIEKVKLWEAQRHLSPYTGQPIPLSDLFDKEKYDVDHIIPISRYFDDSFTNKVISEKSVNQEKANRTAMEYFEVGSLKYSIFTKEQFIAHVNEYFSGVKRKNLLATSIPEDPVQRQIKDTQYIAIRVKEELNKIVGNENVKTTTGSITDYLRNHWGLTDKFKLLLKERYEALLESEKFLEAEYDNYKKDFDSRKKEYEEKEVLFEEQELTREEFIKEYKENYIRYKKNKLIIKGWSKRIDHRHHAIDALIVACTEPAHIKRLNDLNKVLQDWLVEHKSEFMPNFEGSNSELLEEILSLPENERTEIFTQIEKFRAIEMPWKGFPEQVEQKLKEIIISHKPKDKLLLQYNKAGDRQIKLRGQLHEGTLYGISQGKEAYRIPLTKFGGSKFATEKNIQKIVSPFLSGFIANHLKEYNNKKEEAFSAEGIMDLNNKLAQYRNEKGELKPHTPISTVKIYYKDPSKNKKKKDEEDLSLQKLDREKAFNEKLYVKTGDNYLFAVLEGEIKTKKTSQIKRLYDIISFFDATNFLKEEFRNAPDKKTFDKDLLFRQYFEERNKAKLLFTLKQGDFVYLPNENEEVILDKESPLYNQYWGDLKERGKNIYVVQKFSKKQIYFIKHTIADIIKKDVEFGSQNCYETVEGRSIKENCFKLEIDRLGNIVKVIKR

SEQ ID NO: 85 - protein, 1430 aa, Bergeyella zoohelcum
  source 1..1430: note = CCUG 30536
MKHILGLDLGTNSIGWAVVKEAQNDNEQSEIVDVGVRVNPLTTDEKTNFEKGKPISTNADRTLKRSARRNLQRYKLRRKELIELLKEHQLISTDTILTENGKGTTFQTLELRAKSAKEKISLEELARVFLTINKKRGYKSSRKAKNEDEGQLIDGMEIAKRLYEENLTTGQLSLQLLKEGKKSLPDYYRSDLQFELDKVWNFQKQFHSDILTDEFYAQLKGKGQRATSALFLAKYQIYTAENKGSREDKKLQAYQWRVDALSKELTREQLAFVITEINNNLNNSSGYLGAISDRSKELYFNNETVGEYLWKQIAANPHTSLKNQVFYRQDYLDEFEQIWKTQSAFYPEILTDELKKELRDVVIFYQRKLKSQKSLVSFCEFENKEIEIKKEDGTSTKKVIGLKVAPKSSPLFQEFKIWQNLNNVLIRKKGSKTKKVAKNQQAVLFEEEKTISELDLEAKQALFNELNLKGNLKADYCLEILGYSPKEWEMNYSVLEGNRTNKALYEAYLKITDLEGYDAKNHLKVKLNKDEVELDDLKVPASEIKDMVQAIFKEAGINTDILHFNAELDGKDFENQASYQLWHLLYSYEGDDSKSGNELLYKLLETKFGFKKEYAQILANVSLSDDYGSLSTKAMRKIHPYIKENKFSTACELAGYRHSKHSLTKEENDNRVLKDSLEVLKKNSLRQPVVEKILNQMINLVNALLKKYRTENPNFKFDEIRIELARELKKNAEERANMTANINKAKTEHEKIIKILKNEFGLPNPTRNDIIRYRLYEELKANGYKDLYTNIKIPQEKLFTKEIDIEHIIPKSRVFDDSFSNKTLSFRKTNLDKGERTAFDYMESKFGADKLEEYVARVEDLYKNNIISKAKYQKLLKKESEIGDGFVERDLRETQYIAKKAKEILLQITPNVLSTSGGITDRLREDWDLINVMKELNLPKYRALGLTQMEDRKYGQQVEVITDWTKRNDHRHHAMDALTVAFTKHNHIQYLNYLNARKNEKHKEHSNIMGIQQLETIKVTDKNGNEKRVFKAPMPNFRQVTKAFLENILISHKAKNKVVTKNKNKVAGSNKVQEVLTPRGQLHKETVYGKYQYYVQKEEKIGAKFDLETIKKVANPLYQSLLKKRLEENGGDPKKAFTGKNSLAKNPIYLDDTQTEQLPEKVKLVWLENSFSIRKDITPENFKDEKLIDKILDEGVKRILKERLQSFGNDAKKAFSDLDKNPIWLNKEKGITIKRVTISGVANAEPLHTKKDHLGKEILDKEGKPIPVDFISTGSNHHVAVYRDEKGNLQEKVVSVFEAVVRANQGLPIIDKTYNQHLGWEFLFTMKQNEMFVFPNESTGFNPNDIDLLDPKNKRIISPNLFRVQKFSKLQYGNSFVREFVFRHHLETTVEDRKELQGITYKQMKNSTFFNDIIKVRINHLGDIVSIGEY

SEQ ID NO: 86 - protein, 1420 aa, Bifidobacterium bifidum
MSRKNYVDDYAISLDIGNASVGWSAFTPNYRLVRAKGHELIGVRLFDPADTAESRRMARTTRRRYSRRRWRLRLLDALFDQALSEIDPSFLARRKYSWVHPDDENNADCWYGSVLFDSNEQDKRFYEKYPTIYHLRKALMEDDSQHDIREIYLAIHHMVKYRGNFLVEGTLESSNAFKEDELLKLLGRITRYEMSEGEQNSDIEQDDENKLVAPANGQLADALCATRGSRSMRVDNALEALSAVNDLSREQRAIVKAIFAGLEGNKLDLAKIFVSKEFSSENKKILGIYFNKSDYEEKCVQIVDSGLLDDEEREFLDRMQGQYNAIALKQLLGRSTSVSDSKCASYDAHRANWNLIKLQLRTKENEKDINENYGILVGWKIDSGQRKSVRGESAYENMRKKANVFFKKMIETSDLSETDKNRLIHDIEEDKLFPIQRDSDNGVIPHQLHQNELKQIIKKQGKYYPFLLDAFEKDGKQINKIEGLLTFRVPYFVGPLVVPEDLQKSDNSENHWMVRKKKGEITPWNFDEMVDKDASGRKFIERLVGTDSYLLGEPTLPKNSLLYQEYEVLNELNNVRLSVRTGNHWNDKRRMRLGREEKTLLCQRLFMKGQTVTKRTAENLLRKEYGRTYELSGLSDESKFTSSLSTYGKMCRIFGEKYVNEHRDLMEKIVELQTVFEDKETLLHQLRQLEGISEADCALLVNTHYTGWGRLSRKLLTTKAGECKISDDFAPRKHSIIEIMRAEDRNLMEIITDKQLGFSDWIEQENLGAENGSSLMEVVDDLRVSPKVKRGIIQSIRLIDDISKAVGKRPSRIFLELADDIQPSGRTISRKSRLQDLYRNANLGKEFKGIADELNACSDKDLQDDRLFLYYTQLGKDMYTGEELDLDRLSSAYDIDHIIPQAVTQNDSIDNRVLVARAENARKTDSFTYMPQIADRMRNFWQILLDNGLISRVKFERLTRQNEFSEREKERFVQRSLVETRQIMKNVATLMRQRYGNSAAVIGLNAELTKEMHRYLGFSHKNRDINDYHHAQDALCVGIAGQFAANRGFFADGEVSDGAQNSYNQYLRDYLRGYREKLSAEDRKQGRAFGFIVGSMRSQDEQKRVNPRTGEVVWSEEDKDYLRKVMNYRKMLVTQKVGDDFGALYDETRYAATDPKGIKGIPFDGAKQDTSLYGGFSSAKPAYAVLIESKGKTRLVNVTMQEYSLLGDRPSDDELRKVLAKKKSEYAKANILLRHVPKMQLIRYGGGLMVIKSAGELNNAQQLWLPYEEYCYFDDLSQGKGSLEKDDLKKLLDSILGSVQCLYPWHRFTEEELADLHVAFDKLPEDEKKNVITGIVSALHADAKTANLSIVGMTGSWRRMNNKSGYTFSDEDEFIFQSPSGLFEKRVTVGELKRKAKKEVNSKYRTNEKRLPTLSGASQP

SEQ ID NO: 87 - protein, 1138 aa, Bifidobacterium dentium
MLCRCHRRYRIGIDVGLMSVGLAAIEVDETGFPIRILNIQSVIHDGGIDPQLGKKKSISRKAISGVARRTRRMRRRKVVRLRQLDATLESLGFPIVEPDSLDTWEIWLTRAKLASSYIQDDETRKEDVSIALRHIARHRGWRNPYSNVESLFVDVAPSEQYEELRRKAEEKLGTSLSGNPTSAEIVECILKRQVGEVQLRTRSRKGVNGNAVEKEGLLPTKLMQSDNAAEIRRIFKVQRIDDETGRKLLRAVFKACSPKGSVERRVGRDALAPGLPRALKASLAFQEYRIANVLTNLVISEDGTKRKLTIAEKQRVFGFLSSNETDDITWIDVAEKLGLERRQIQGVGCLTADGEERISSTPPRNITALHIHSAKPVIREKLVAWWKAASPTVRETMVELLSNTVDIDRVREDMDYSSAVAFIDSLGDEELTALDSVDLLSGRAAYSRQTLKQLTERMLNTDDDLHEARKAVFGVDDNWKPPVDAISTSVGNPAVDRVLKIVNRYLLACQKRWRNPQSVQIEHVRESFSSVAKAKETERVQGERARYRNDLRRELCEQEGLNKIRESDIRRWESVQRQNGTCLYCGSPITFRTCEMDHIVPRKGVGSTNTRVNLAAACAACNKLKSNTAFSVWARTEGAANRKVSQRDAIERVKTFIFNKSVPPREQRAFKQAVISRLRQAESDPAIDNRSIESVAWMADELHRRIEAYFNQDADVSGNTPATQVWVFQGRVTALARKASGIEGRIHFAGEWKKTRLDRRHHAVDAAVIAMMNHSAAQTLVERDSLRLSQWITRKPETWKNYPFSEGQKKTRFKEWLDCMNALLDLLNDALDSDRVPVTRCQRMSLGNSQAHAATIRKMKRVELFSPMDADLIRRASTPALYCALTRLPEYSPEKGLPENRGREIVLNGRHIRSTETVDFFASGAAQLMVRNGSAEIGDSIHHMRIYRYRKTGAKSQEYVYGMIRVFQIDLLHASSENLFAVQLPSQSVSVRYGDKNVVQAIQEGRAEYLGHIVPNDEILISYEGVRMKDSEKIGAYANDFSGTASELAQRRHWVVVGSDVSKLALRPSYLSEEGLENSGSESERLSKQTRKVIEGKGWVVAVNILAKYHPVVIRRNALGEPRFRTNSGMPVSWRWDR

SEQ ID NO: 88 - protein, 1187 aa, Bifidobacterium longum
MLSRQLLGASHLARPVSYSYNVQDNDVHCSYGERCFMRGKRYRIGIDVGLNSVGLAAVEVSDENSPVRLLNAQSVIHDGGVDPQKNKEAITRKNMSGVARRTRRMRRRKRERLHKLDMLLGKFGYPVIEPESLDKPFEEWHVRAELATRYIEDDELRRESISIALRHMARHRGWRNPYRQVDSLISDNPYSKQYGELKEKAKAYNDDATAAEEESTPAQLVVAMLDAGYAEAPRLRWRTGSKKPDAEGYLPVRLMQEDNANELKQIFRVQRVPADEWKPLFRSVFYAVSPKGSAEQRVGQDPLAPEQARALKASLAFQEYRIANVITNLRIKDASAELRKLTVDEKQSIYDQLVSPSSEDITWSDLCDFLGFKRSQLKGVGSLTEDGEERISSRPPRLTSVQRIYESDNKIRKPLVAWWKSASDNEHEAMIRLLSNTVDIDKVREDVAYASAIEFIDGLDDDALTKLDSVDLPSGRAAYSVETLQKLTRQMLTTDDDLHEARKTLFNVTDSWRPPADPIGEPLGNPSVDRVLKNVNRYLMNCQQRWGNPVSVNIEHVRSSFSSVAFARKDKREYEKNNEKRSIFRSSLSEQLRADEQMEKVRESDLRRLEAIQRQNGQCLYCGRTITFRTCEMDHIVPRKGVGSTNTRTNFAAVCAECNRMKSNTPFAIWARSEDAQTRGVSLAEAKKRVTMFTFNPKSYAPREVKAFKQAVIARLQQTEDDAAIDNRSIESVAWMADELHRRIDWYFNAKQYVNSASIDDAEAETMKTTVSVFQGRVTASARRAAGIEGKIHFIGQQSKTRLDRRHHAVDASVIAMMNTAAAQTLMERESLRESQRLIGLMPGERSWKEYPYEGTSRYESFHLWLDNMDVLLELLNDALDNDRIAVMQSQRYVLGNSIAHDATIHPLEKVPLGSAMSADLIRRASTPALWCALTRLPDYDEKEGLPEDSHREIRVHDTRYSADDEMGFFASQAAQIAVQEGSADIGSAIHHARVYRCWKTNAKGVRKYFYGMIRVFQTDLLRACHDDLFTVPLPPQSISMRYGEPRVVQALQSGNAQYLGSLVVGDEIEMDFSSLDVDGQIGEYLQFFSQFSGGNLAWKHWVVDGFFNQTQLRIRPRYLAAEGLAKAFSDDVVPDGVQKIVTKQGWLPPVNTASKTAVRIVRRNAFGEPRLSSAHHMPCSWQWRHE

SEQ ID NO: 89 - protein, 1124 aa, Bifidobacterium longum
  source 1..1124: note = subsp. longum 2-2B
LTGHSGHTFWPTSSSPPIQLEQEKRPLPQRNTSQNGHTFWPITRERCFMRGKRYRIGIDVGLNSVGLAAVEVSDENSPVRLLNAQSVIHDGGVDPQKNKEAITRKNMSGVARRTRRMRRRKRERLHKLDMLLGKFGYPVIEPESLDKPFEEWHVRAELATRYIEDDELRRESISIALRHMARHRGWRNPYRQVDSLISDNPYSKQYGELKEKAKAYNDDATAAEEESTPAQLVVAMLDAGYAEAPRLRWRTGSKKPDAEGYLPVRLMQEDNANELKQIFRVQRVPADEWKPLFRSVFYAVSPKGSAEQRVGQDPLAPEQARALKASLAFQEYRIANVITNLRIKDASAELRKLTVDEKQSIYDQLVSPSSEDITWSDLCDFLGFKRSQLKGVGSLTEDGEERISSRPPRLTSVQRIYESDNKIRKPLVAWWKSASDNEHEAMIRLLSNTVDIDKVREDVAYASAIEFIDGLDDDALTKLDSVDLPSGRAAYSVETLQKLTRQMLTTDDDLHEARKTLFNVTDSWRPPADPIGEPLGNPSVDRVLKNVNRYLMNCQQRWGNPVSVNIEHVRSSFSSVAFARKDKREYEKNNEKRSIFRSSLSEQLRADEQMEKVRESDLRRLEAIQRQNGQCLYCGRTITFRTCEMDHIVPRKGVGSTNTRTNFAAVCAECNRMKSNTPFAIWARSEDAQTRGVSLAEAKKRVTMFTFNPKSYAPREVKAFKQAVIARLQQTEDDAAIDNRSIESVAWMADELHRRIDWYFNAKQYVNSASIDDAEAETMKTTVSVFQGRVTASARRAAGIEGKIHFIGQQSKTRLDRRHHAVDASVIAMMNTAAAQTLMERESLRESQRLIGLMPGERSWKEYPYEGTSRYESFHLWLDNMDVLLELLNDALDNDRIAVMQSQRYVLGNSIAHDATIHPLEKVPLGSAMSADLIRRASTPALWCALTRLPDYDEKEGLPEDSHREIRVHDTRYSADDEMGFFASQAAQIAVQEGSADIGSAIHHARVYRCWKTNAKGVRKYFYGMIRVFQTDLLRACHDDLFTVPLPPQSISMRYGEPRVVQALQSGNAQYLGSLVVGDEIEMDFPVSMLMVRLASIYNSSRSLVEGTLHGNIGLLMDSLTRRS

SEQ ID NO: 90 - protein, 1138 aa, Bifidobacterium sp.
MNSVGLAAVEVSDENSPVRLLNAQSVIHDGGVDPQKNKEAITRKNMSGVARRTRRMRRRKRERLHKLDMLLGKFGYPVIEPESLDKPFEEWHVRAELATRYIEDDELRRESISIALRHMARHRGWRNPYRQVDSLISDNPYSKQYGELKEKAKAYNDDATAAEEESTPAQLVVAMLDAGYAEAPRLRWRTGSKKPDAEGYLPVRLMQEDNANELKQIFRVQRVPADEWKPLFRSVFYAVSPKGSAEQRVGQDPLAPEQARALKASLAFQEYRIANVITNLRIKDASAELRKLTVDEKQSIYDQLVSPSSEDITWSDLCDFLGFKRSQLKGVGSLTEDGEERISSRPPRLTSVQRIYESDNKIRKPLVAWWKSASDNEHEAMIRLLSNTVDIDKVREDVAYASAIEFIDGLDDDALTKLDSVDLPSGRAAYSVETLQKLTRQMLTTDDDLHEARKTLFNVTDSWRPPADPIGEPLGNPSVDRVLKNVNRYLMNCQQRWGNPVSVNIEHVRSSFSSVAFARKDKREYEKNNEKRSIFRSSLSEQLRADEQMEKVRESDLRRLEAIQRQNGQCLYCGRTITFRTCEMDHIVPRKGVGSTNTRTNFAAVCAECNRMKSNTPFAIWARSEDAQTRGVSLAEAKKRVTMFTFNPKSYAPREVKAFKQAVIARLQQTEDDAAIDNRSIESVAWMADELHRRIDWYFNAKQYVNSASIDDAEAETMKTTVSVFQGRVTASARRAAGIEGKIHFIGQQSKTRLDRRHHAVDASVIAMMNTAAAQTLMERESLRESQRLIGLMPGERSWKEYPYEGTSRYESFHLWLDNMDVLLELLNDALDNDRIAVMQSQRYVLGNSIAHDATIHPLEKVPLGSAMSADLIRRASTPALWCALTRLPDYDEKEGLPEDSHREIRVHDTRYSADDEMGFFASQAAQIAVQEGSADIGSAIHHARVYRCWKTNAKGVRKYFYGMIRVFQTDLLRACHDDLFTVPLPPQSISMRYGEPRVVQALQSGNAQYLGSLVVGDEIEMDFSSLDVDGQIGEYLQFFSQFSGGNLAWKHWVVDGFFNQTQLRIRPRYLAAEGLAKAFSDDVVPDGVQKIVTKQGWLPPVNTASKTAVRIVRRNAFGEPRLSSAHHMPCSWQWRHE

SEQ ID NO: 91 - protein, 1151 aa, Bifidobacterium sp.
  source 1..1151: note = 12_1_47BFAA
MRGKRYRIGIDVGLNSVGLAAVEVSDENSPVRLLNAQSVIHDGGVDPQKNKEAITRKNMSGVARRTRRMRRRKRERLHKLDMLLGKFGYPVIEPESLDKPFEEWHVRAELATRYIEDDELRRESISIALRHMARHRGWRNPYRQVDSLISDNPYSKQYGELKEKAKAYNDDATAAEEESTPAQLVVAMLDAGYAEAPRLRWRTGSKKPDAEGYLPVRLMQEDNANELKQIFRVQRVPADEWKPLFRSVFYAVSPKGSAEQRVGQDPLAPEQARALKASLAFQEYRIANVITNLRIKDASAELRKLTVDEKQSIYDQLVSPSSEDITWSDLCDFLGFKRSQLKGVGSLTEDGEERISSRPPRLTSVQRIYESDNKIRKPLVAWWKSASDNEHEAMIRLLSNTVDIDKVREDVAYASAIEFIDGLDDDALTKLDSVDLPSGRAAYSVETLQKLTRQMLTTDDDLHEARKTLFNVTDSWRPPADPIGEPLGNPSVDRVLKNVNRYLMNCQQRWGNPVSVNIEHVRSSFSSVAFARKDKREYEKNNEKRSIFRSSLSEQLRADEQMEKVRESDLRRLEAIQRQNGQCLYCGRTITFRTCEMDHIVPRKGVGSTNTRTNFAAVCAECNRMKSNTPFAIWARSEDAQTRGVSLAEAKKRVTMFTFNPKSYAPREVKAFKQAVIARLQQTEDDAAIDNRSIESVAWMADELHRRIDWYFNAKQYVNSASIDDAEAETMKTTVSVFQGRVTASARRAAGIEGKIHFIGQQSKTRLDRRHHAVDASVIAMMNTAAAQTLMERESLRESQRLIGLMPGERSWKEYPYEGTSRYESFHLWLDNMDVLLELLNDALDNDRIAVMQSQRYVLGNSIAHDATIHPLEKVPLGSAMSADLIRRASTPALWCALTRLPDYDEKEGLPEDSHREIRVHDTRYSADDEMGFFASQAAQIAVQEGSADIGSAIHHARVYRCWKTNAKGVRKYFYGMIRVFQTDLLRACHDDLFTVPLPPQSISMRYGEPRVVQALQSGNAQYLGSLVVGDEIEMDFSSLDVDGQIGEYLQFFSQFSGGNLAWKHWVVDGFFNQTQLRIRPRYLAAEGLAKAFSDDVVPDGVQKIVTKQGWLPPVNTASKTAVRIVRRNAFGEPRLSSAHHMPCSWQWRHE

SEQ ID NO: 92 - protein, 1092 aa, Brevibacillus laterosporus
  source 1..1092: note = GI-9
MAYTMGIDVGIASCGWAIVDLERQRIIDIGVRTFEKAENPKNGEALAVPRREARSSRRRLRRKKHRIERLKYMFVRNGLAVDIQHLEQTLRSQNEIDVWQLRVDGLDRMLTQKEWLRVLIHLAQRRGFQSNRKTDGSSEDGQVLVNVTENDRLMEEKDYRTVAEMMVKDEKFSDHKRNKNGNYHGVVSRASLLVEIHTLFESQRQHHNFLASKDFELEYINIWSSQRPVATKDQIEKMIGTCTFLPKEKRAPKASWHFQYFMLLQTINHIRITNAQGTRPLNKEEIEQVVNMALTKSKVSYHDIRKVLDLSEEYQFVGLDYGKEDEKKKVESKETIIKLDDYHKLNKIFNEVELAKGETWEAVDYDTVAYALTFFKDDEDIRDYLQNKYKDSKNRLVKNVANKEYTNELIEKVSTLSFRKVGHLSLKALRKIIPFLEQGMTYDKACQAAGFNFQGISKKKRSVVLPVIDQISNPVVNRALTQTRKVINALIKKYGSPETIHIETARELSKRFDERKNITKDYKENRDKNERAKKHLSELGIINPTGLDIVKYKLWCEQQGRCMYSNQPISFERLRESGYTEVDHIIPYSRSMNDSYNNRVLVMTRENREKSNQTPYEYMGNDTQRWDEFEQRVTTNPQIKKEKRQNLLLKGFTNRRELEMLERNLNDTRHITKYLSHFISTNLEFSPSDKKKKVVNTSGRITSHLRSRWGLEKNREQNDLHHAMDAVVIAVTSDSFIQQVTNYYKRKERRELNGDDKFPLPWKFFREEVIARLSPNPKEQIEALPNHFYSEDELADLQPIFVSRMPKRSITGEAHQAQFRRVVGKTKEGKNITAKKTALVDISYDKNGDFNMYGRETDPATYEAIKERYLEFGGNAKKAFSTDLHKPKKDGTKGPLIKSVRIMENKTLVHPVNKGKGVVYNSSIVRTDVFQRKEKYYLLPVYVTDVTKGKLPNKVIAAKKGYDDWIEVDDSFTFLYSLYPNDLIFIRQNPKKKISLKKRIESHSISDSKEVQEILTYYKGVDSSTAAIEFITHDGSYYAKGVGVQNLDCFEKYQVDILGNYSKVKGEKRLELETSDNNHKGKDVNSIKSTSR

SEQ ID NO: 93 - protein, 1428 aa, Burkholderiales bacterium
  source 1..1428: note = 1_1_47
MGKTHIIGVGLDLGGTYTGTFITSHPSDEAEHRDHSSAFTVVNSEKLSFSSKSRTAVRHRVRSYKGFDLRRRLLLLVAEYQLLQKKQTLAPEERENLRIALSGYLKRKGYARTEAETDTSVLESLDPSVFSSAPSFTNFFNDSEPLNIQWEAIANSPETTKALNKELSGQKEADFKKYIKTSFPEYSAKEILANYVEGRRAILDASKYIANLQSLGHKHRSKYLSDILQDMKRDSRITRLSEAFGSTDNLWRIIGNISNLQERAVRWYFNDAKFEQGQEQLDAVKLKNVLVRALKYLRSDDKEWSASQKQIIQSLEQSGDVLDVLAGLDPDRTIPPYEDQNNRRPPEDQTLYLNPKALSSEYGEKWKSWANKFAGAYPLLTEDLTEILKNTDRKSRIKIRSDVLPDSDYRLAYILQRAFDRSIALDECSIRRTAEDFENGVVIKNEKLEDVLSGHQLEEFLEFANRYYQETAKAKNGLWFPENALLERADLHPPMKNKILNVIVGQALGVSPAEGTDFIEEIWNSKVKGRSTVHSICNAIENERKTYGPYFSEDYKFVKTALKEGKTEKELSKKFAAVIKVLKMVSEVVPFIGKELRLSDEAQSKFDNPYSLAQLYNLIETERNGFSKVSLAAHLENAWRMTMTDGSAQCCRLPADCVRPFDGFIRKAIDRNSWEVAKRIAEEVKKSVDFTNGTVKIPVAIEANSFNFTASLTDLKYIQLKEQKLKKKLEDIQRNEENQEKRWLSKEERIRADSHGICAYTGRPLDDVGEIDHIIPRSLTLKKSESIYNSEVNLIFVSAQGNQEKKNNIYLLSNLAKNYLAAVFGASDLSQITNEIESTVLQLKAAGRLGYFDLLSEKERACARHALFLNSDSEARRAVIDVLGSRRKASVNGTQAWFVRSIFSKVRQALAAWTQETGNELIFDAISVPAADSSEMRKRFAEYRPEFRKPKVQPVASHSIDAMCIYLAACSDPFKTKRMGSQLAIYEPINFDNLFTGSCQVIQNTPRNFSDKTNIANSPIFKETIYAERFLDIIVSRGEIFIGYPSNMPFEEKPNRISIGGKDPFSILSVLGAYLDKAPSSEKEKLTIYRVVKNKAFELFSKVAGSKFTAEEDKAAKILEALHFVTVKQDVAATVSDLIKSKKELSKDSIENLAKQKGCLKKVEYSSKEFKFKGSLIIPAAVEWGKVLWNVFKENTAEELKDENALRKALEAAWPSSFGTRNLHSKAKRVFSLPVVATQSGAVRIRRKTAFGDFVYQSQDTNNLYSSFPVKNGKLDWSSPIIHPALQNRNLTAYGYRFVDHDRSISMSEFREVYNKDDLMRIELAQGTSSRRYLRVEMPGEKFLAWFGENSISLGSSFKFSVSEVFDNKIYTENAEFTKFLPKPREDNKHNGTIFFELVGPRVIFNYIVGGAASSLKEIFSEAGKERS

SEQ ID NO: 94 - protein, 1442 aa, Caenispirillum salinarum
  source 1..1442: note = AK4
MPVLSPLSPNAAQGRRRWSLALDIGEGSIGWAVAEVDAEGRVLQLTGTGVTLFPSAWSNENGTYVAHGAADRAVRGQQQRHDSRRRRLAGLARLCAPVLERSPEDLKDLTRTPPKADPRAIFFLRADAARRPLDGPELFRVLHHMAAHRGIRLAELQEVDPPPESDADDAAPAATEDEDGTRRAAADERAFRRLMAEHMHRHGTQPTCGEIMAGRLRETPAGAQPVTRARDGLRVGGGVAVPTRALIEQEFDAIRAIQAPRHPDLPWDSLRRLVLDQAPIAVPPATPCLFLEELRRRGETFQGRTITREAIDRGLTVDPLIQALRIRETVGNLRLHERITEPDGRQRYVPRAMPELGLSHGELTAPERDTLVRALMHDPDGLAAKDGRIPYTRLRKLIGYDNSPVCFAQERDTSGGGITVNPTDPLMARWIDGWVDLPLKARSLYVRDVVARGADSAALARLLAEGAHGVPPVAAAAVPAATAAILESDIMQPGRYSVCPWAAEAILDAWANAPTEGFYDVTRGLFGFAPGEIVLEDLRRARGALLAHLPRTMAAARTPNRAAQQRGPLPAYESVIPSQLITSLRRAHKGRAADWSAADPEERNPFLRTWTGNAATDHILNQVRKTANEVITKYGNRRGWDPLPSRITVELAREAKHGVIRRNEIAKENRENEGRRKKESAALDTFCQDNTVSWQAGGLPKERAALRLRLAQRQEFFCPYCAERPKLRATDLFSPAETEIDHVIERRMGGDGPDNLVLAHKDCNNAKGKKTPHEHAGDLLDSPALAALWQGWRKENADRLKGKGHKARTPREDKDFMDRVGWRFEEDARAKAEENQERRGRRMLHDTARATRLARLYLAAAVMPEDPAEIGAPPVETPPSPEDPTGYTAIYRTISRVQPVNGSVTHMLRQRLLQRDKNRDYQTHHAEDACLLLLAGPAVVQAFNTEAAQHGADAPDDRPVDLMPTSDAYHQQRRARALGRVPLATVDAALADIVMPESDRQDPETGRVHWRLTRAGRGLKRRIDDLTRNCVILSRPRRPSETGTPGALHNATHYGRREITVDGRTDTVVTQRMNARDLVALLDNAKIVPAARLDAAAPGDTILKEICTEIADRHDRVVDPEGTHARRWISARLAALVPAHAEAVARDIAELADLDALADADRTPEQEARRSALRQSPYLGRAISAKKADGRARAREQEILTRALLDPHWGPRGLRHLIMREARAPSLVRIRANKTDAFGRPVPDAAVWVKTDGNAVSQLWRLTSVVTDDGRRIPLPKPIEKRIEISNLEYARLNGLDEGAGVTGNNAPPRPLRQDIDRLTPLWRDHGTAPGGYLGTAVGELEDKARSALRGKAMRQTLTDAGITAEAGWRLDSEGAVCDLEVAKGDTVKKDGKTYKVGVITQGIFGMPVDAAGSAPRTPEDCEKFEEQYGIKPWKAKGIPLA

SEQ ID NO: 95 - protein, 984 aa, Campylobacter coli
  source 1..984: note = 1098
MARILAFDIGISSIGWAFSENDELKDCGVRIFTKAENPKTGESLALPRRLARSARKRLARRKARLNHLKHLIANEFKLNYEDYQSFDESLAKAYKGSLISPYELRFRALNELLSKQDFARVILHIAKRRGYDDIKNNGDEEKSEILKAIKQNEEKLVNYQSVGEYLYKEYFQKFKENSKEFINVRNKKESYERCIAQSFLKDELKLIFQKQREFGFSFSKKFEEEVLSVAFYKRALKDFSHLVGNCSFFTDEKRAPKNSPLAFMFVALTRIINLLNNLKNTEGILYTKDDLNALLNEVLKNGTLTYKQTKKLLGLSDDYEFKGEKGTYFIEFKKYKEFIKALGEHNLSQDDLNEIAKDITLIKDEIKLKKALAKYDLNQNQIDSLSKLEFKDHLNISFKALKLITPLMLEGKKYDEACNELNLKVAINEDKKDFLPAFNETYYKDEVTNPVVLRAIKEYRKVLNALLKKYGKVHKINIELAREVGKNYSQRAKIEKEQNENYKAKKDAELECEKLGLKINSKNILKLRLFKEQKEFCAYSGEKIKISDLQDEKMLEIDHIYPYSRSFDDSYMNKVLVFTKQNQEKLNQTPFEAFGNDSAKWQKIEVLAKNLPTKKQKRILDKNYKDKEQKNFKDRNLNDTRYIARLVLNYTKDYLDFLPLSDDENTKLNDTQKGSKVHVEAKSGMLTSALRHTWGFSAKDRNNHLHHAIDAVIIAYANNSIVKAFSDFKKEQESNSAELYAKKISELDYKNKRKFFEPFSGFRQKVLDKIDEIFVSKPERKKPSGALHEETFRKEEEFYQSYGGKEGVLKALELGKIRKVNGKIVKNGDMFRVDIFKHKKTNKFYAVPIYTMDFALKVLPNKAVARSKKGEIKDWILMDENYEFCFSLYKDSLILIQTKDMQEPEFVYYNAFTSSTVSLIVSKHDNKFETLSKNQKILFKNANEKEVIAKSIGIQNLKVFEKYIVSALGEVTKAEFRQREDFKK

SEQ ID NO: 96 - protein, 984 aa, Campylobacter coli
  source 1..984: note = 111-3
MARILAFDIGISSIGWAFSENDELKDCGVRIFTKAENPKTGESLALPRRLARSARKRLARRKARLNHLKHLIANEFKLNYEDYQSFDESLAKAYKGSLISPYELRFRALNELLSKQDFARVILHIAKRRGYDDIKNNGDEEKSEILKAIKQNEEKLVNYQSVGEYLYKEYFQKFKENSKEFINVRNKKESYERCIAQSFLKDELKLIFQKQREFGFSFSKKFEEEVLSVAFYKRALKDFSHLVGNCSFFTDEKRAPKNSPLAFMFVALTRIINLLNNLKNTEGILYTKDDLNTLLNEVLKNGTLTYKQTKKLLGLSDDYEFKGEKGTYFIEFKKYKEFIKALGEHNLSQDNLNEIAKDITLIKDEIKLKKALAKYDLNQNQIDSLSKLEFKDHLNISFKALKLITPLMLEGKKYDEAYNELNLKVAINEDKKDFLPAFNETYYKDEVTNPVVLRAIKEYRKVLNALLKKYGKVHKINIELAREVGKNHSQRAKIEKEQNENYKAKKDAELECEKLGLKINSKNILKLRLFKEQKEFCAYSGEKIKISDLQDEKMLEIDHIYPYSRSFDDSYMNKVLVFTKQNQEKLNQTPFEAFGNDSAKWQKIEVLAKNLPTKKQKRILDKNYKDKEQKDFKDRNLNDTRYIARLVLNYTKDYLDFLPLSDDENTKLNDTQKGSKVHVEAKSGMLTSALRHTWGFSAKDRNNHLHHAIDAVIIAYANNSIVKAFSDFKKEQESNSAELYAKKISELDYKNKRKFFEPFSGFRQKVLDKIDEIFVSKPERKKPSGALHEETFRKEEEFYQSYGGKEGVLKALELGKIRKVNGKIVKNGDMFRVDIFKHKKTNKFYAVPIYTMDFALKVLPNKAVARSKKGEIKDWILMDENYEFCFSLYKDSLILIQTKDMQEPELVYFNAFTSSTVSLIVSKHDNKFETLSKNQKILFKNANEKEVIAKSIGIQNLKVFEKYIVSALGEVTKAEFRQREDFKK

SEQ ID NO: 97 - protein, 987 aa, Campylobacter coli
  source 1..987: note = 132-6
MARILAFDIGISSIGWAFSENDELKDCGVRIFTKAENPKTGESLALPRRLARSARKRLARRKARLNHLKHLIANEFKLNYEDYQSFDESLAKAYKGSLISPYELRFRALNELLSKQDFARVILHIAKRRGYDDIKNNGDEEKSEILKAIKQNEEKLVNYQSVGEYLYKEYFQKFKENSKEFINVRNKKESYERCIAQSFLKDELKLIFQKQREFGFSFSKKFEEEVLSVAFYKRALKDFSHLVGNCSFFTDEKRAPKNSPLAFMFVALTRIINLLNNLKNTEGILYTKDDLNTLLNEVLKNGTLTYKQTKKLLGLSDDYEFKGEKGTYFIEFKKYKEFIKALGEHNLSQDNLNEIAKDITLIKDEIKLKKALAKYDLNQNQIDSLSKLEFKDHLNISFKALKLITPLMLEGKKYDEAYNELNLKVAINEDKKDFLPAFNETYYKDEVTNPVVLRAIKEYRKVLNALLKKYGKVHKINIELAREVGKNHSQRAKIEKEQNENYKAKKDAELECEKLGLKINSKNILKLRLFKEQKEFCAYSGEKIKISDLQDEKMLEIDHIYPYSRSFDDSYMNKVLVFTKQNQEKLNQTPFEAFGNDSAKWQKIEVLAKNLPTKKQKRILDKNYKDKEQKDFKDRNLNDTRYIARLVLNYTKDYLDFLPLSDDENTKLNDTQKGSKVHVEAKSGMLTSALRHTWGFSAKDRNNHLHHAIDAVIIAYANNSIVKAFSDFKKEQESNSAELYAKKISELDYKNKRKFFEPFSGFRQKVLDKIDEIFVSKPERKKPSGALHEETFRKEEEFYQSYGGKEGVLKALELGKIRKVNGKIVKNGDMFRVDIFKHKKTNKFYAVPIYTMDFALKVLPNKAVARSKKGEIKDWILMDENYEFCFSLYKDSLILIQTKDMQEPELVYFNAFTSSTVSLIVSKHDNKFETLSKNQKILFKNANEKEVIAKSIGIQNLKVFEKYIVSALGEVTKAEFRQREDFKNELR

SEQ ID NO: 98 - protein, 984 aa, Campylobacter coli
  source 1..984: note = 151-9
MARILAFDIGISSIGWAFSENDELKDCGVRIFTKAENPKTGESLALPRRLARSARKRLARRKARLNHLKHLIANEFKLNYEDYQSFDESLAKAYKGSLISPYELRFRALNELLSKQDFARVILHIAKRRGYDDIKNNGDEEKSEILKAIKQNEEKLVNYQSVGEYLYKEYFQKFKENSKEFINVRNKKESYERCIAQSFLKDELKLIFQKQREFGFSFSKKFEEEVLSVAFYKRALKDFSHLVGNCSFFTDEKRAPKNSPLAFMFVALTRIINLLNNLKNTEGILYTKDDLNTLLNEVLKNGTLTYKQTKKLLGLSDDYEFKGEKGTYFIEFKKYKEFIKALGEHNLSQDNLNEIAKDITLIKDEIKLKKALAKYDLNQNQIDSLSKLEFKDHLNISFKALKLITPLMLEGKKYDEAYNELNLKVAINEDKKDFLPAFNETYYKDEVTNPVVLRAIKEYRKVLNALLKKYGKVHKINIELAREVGKNHSQRAKIEKEQNENYKAKKDAELECEKLGLKINSKNILKLRLFKEQKEFCAYSGEKIKISDLQDEKMLEIDHIYPYSRSFDDSYMNKVLVFTKQNQEKLNQTPFEAFGNDSAKWQKIEVLAKNLPTKKQKRILDKNYKDKEQKDFKDRNLNDTRYIARLVLNYTKDYLDFLPLSNDENTKLNDTQKGSKVHVEAKSGMLTSALRHTWGFSAKDRNNHLHHAIDAVIIAYANNSIVKAFSDFKKEQESNSAELYAKKISELDYKNKRKFFEPFSGFRQKVLDKIDEIFVSKPERKKPSGALHEETFRKEEEFYQSYGGKEGVLKALELGKIRKVNGKIVKNGDMFRVDIFKHKKTNKFYAVPIYTMDFALKVLPNKAVARSKKGEIKDWILMDENYEFCFSLYKDSLILIQTKDMQEPELVYFNAFTSSTVSLIVSKHDNKFETLSKNQKILFKNANEKEVIAKSIGIQNLKVFEKYIVSALGEVTKAEFRQREDFKK

SEQ ID NO: 99 - protein, 984 aa, Campylobacter coli
  source 1..984: note = 1909
MARILAFDIGISSIGWAFSENDELKDCGVRIFTKAENPKTGESLALPRRLARSARKCLARRKARLNHLKHLIANEFKLNYEDYQSFDESLAKAYKGSLISPYELRFRALNELLSKQDFARVILHIAKRRGYDDIKNNGDEEKSEILKAIKQNEEKLVNYQSVGEYLYKEYFQKFKENSKEFINVRNKKESYERCIAQSFLKDELKLIFQKQREFGFSFSKKFEEEVLSVAFYKRALKDFSHLVGNCSFFTDEKRAPKNSPLAFMFVALTRIINLLNNLKNTEGILYTKDDLNALLNEVLKNGTLTYKQTKKLLGLSDDYEFKGEKGTYFIEFKKYKEFIKALGEHNLSQDDLNEIAKDITLIKDEIKLKKALAKYDLNQNQIDSLSKLEFKDHLNISFKALKLITPLMLEGKKYDEACNELNLKVAINEDKKDFLPAFNETYYKDEVTNPVVLRAIKEYRKVLNALLKKYGKVHKINIELAREVGKNHSQRAKIEKEQNENYKAKKDAELECEKLGLKINSKNILKLRLFKEQKEFCAYSGEKIKISDLQDEKMLEIDHIYPYSRSFDDSYMNKVLVFTKQNQEKLNQTPFEAFGNDSAKWQKIEVLAKNLPTKKQKRILDKNYKDKEQKNFKDRNLNDTRYIARLVLNYTKDYLDFLPLSDDENTKLNDTQKGSKVHVEAKSGMLTSALRHTWGFSAKDRNNHLHHAIDAVIIAYANNSIVKAFSDFKKEQESNSAELYAKKISELDYKNKRKFFEPFSGFRQKVLDKIDEIFVSKPERKKPSGALHEETFRKEEEFYQSYGGKEGVLKALELGKIRKVNGKIVKNGDMFRVDIFKHKKTNKFYAVPIYTMDFALKVLPNKAVARSKKGEIKDWILMDENYEFCFSLYKDSLILIQTKDMQEPEFVYYNAFTSSTVSLIVSKHDNKFETLSKNQKILFKNANEKEVIAKSIGIQNLKVFEKYIVSALGEVTKAEFRQREDFKK

SEQ ID NO: 100 - protein, 965 aa, Campylobacter coli
  source 1..965: note = 1957
MKIIGFNLGIANIGWALRENDEIIDCGVRVFDIPENPKNGNSLALERRENKARMKIVKRKKARMLATKTFLKKELNVDLSKLFLIGSTQSIYELRTKALSSLISKEELSAIILHIAKHRGYDDSALKNENGTIIEALNKNKEAMLKFKSVGEYFYKNFVQNKEVKKIRNTTEDYSNSVPRSLLKQELDLILDKQKELGLIKNADFKEKLFEIIFFKRPLKDFSNKIGNCIFFENEKRAAKNTISACEFVALGKVVNLLKSIEKDIGIVYEKDSINEIMSIILDKTSISYKKIRDILNLPQDINFKGLDYSKNNAENSKLVDLKKLNEFKKALGDGFANLDKDILDSIATDITLTKDTATLKEKLKNYNVLNAEQIEKLSELVFNDHINLSLKALKQIIPLMYEGKRYDEACELCNFTIAKNQEKNEYLPLFEKTRFAKDISSPVVIRAICEFRKLLNDIIRRYGSVHKIHLELTRDFGISFNDRKKIIKEIEQNEQSRIKALETIKELKLEETSKNIQIVRLFEDQKGICPYSGLKMDLKCLDELVIDYIRPYNRSLDDSYSNKILTFKKLNDLKQGKTPFEAFGEDEKLWAEINERIKEYNGKKRFKIFDKFFKDKKPFDFTEQTLQDTRWLTKLVASYLNEYLLFLPINEDENTALGYGEKGSKQHVVLSSGMITQMLRNFWYLGFKNHKDYKNNAMDAIIVAFTTNSIIFAFNNFKKELDLAKAEFYANKISESDYLLKRKFLPPFSGFKEQALEKVKNIFVSHSLKIKNKGTLHELTPLKIKELKNTYGDLDLAVKLGKIRKYNDKYYANAKGSLVRTDLFADKENKFHAVSIYKADFSTKKLPNKTPATTSNGETKEGIEMNENYNFCMSLYKNTPISVKIKGMKEPIICYYHGFNTSGSKITYKKHDNNYHNLSEDEMVVFRKNDKESIVVGKILEIKKYSISPSGELSLIENEERKWF

SEQ ID NO: 101 - protein, 984 aa, Campylobacter coli
  source 1..984: note = 2692
MARILAFDIGISSIGWAFSENDELKDCGVRIFTKAENPKTGESLALPRRLARSARKRLARRKARLNHLKHLIANEFKLNYEDYQSFDESLAKAYKGSLISPYELRFRALNELLSKQDFARVILHIAKRRGYDDIKNSDDKEKGAILKAIKQNEEKLTNYQSVGEYLYKEYFQKFKENSKEFTNVRNKKESYERCIAQSFLKDELKLIFKKQREFGFSFSKKFEEEVLSVAFYKRALKDFSHLVGNCSFFTDEKRAPKNSPLAFMFVALTRIINLLNNLKNTEGILYTKDDLNALLNEVLKNGTLTYKQTKKLLGLSDDYEFKGEKGTYFIEFKKYKEFIKALGDHSLSQDDLNEIAKDITLIKDEIKLKKALAKYDLNQNQIDSLSKLEFKDHLNISFKALKLITPLMLEGKKYDEACNELNLKVAINEDKKDFLPAFNETYYKDEVTNPVVLRAIKEYRKVLNALLKKYGKVHKINIELAREVGKNYSQRAKIEKEQNENYKAKKDAELECEKLGLKINSKNILKLRLFKEQKEFCAYSGEKIKISDLQDEKMLEIDHIYPYSRSFDDSYMNKVLVFTKQNQEKLNQTPFEAFGNDSAKWQKIEVLAKNLPTKKQKRILDKNYKDKEQKDFKDRNLNDTRYIARLVLNYTKDYLDFLPLSDDENTKLNDTQKGSKVHVEAKSGMLTSALRHTWGFSAKDRNNHLHHAIDAVIIAYANNSIVKAFSDFKKEQESNSAELYAKKISELDYKNKRKFFEPFSGFRQKVLDKIDEIFVSKPERKKPSGALHEETFRKEEEFYQSYGGKEGVLKALELGKIRKVNGKIVKNGDMFRVDIFKHKKTNKFYAVPIYTMDFALKVLPNKAVARSKKGEIKDWILMDENYEFCFSLYKDSLILIQTKDMQEPEFVYYNAFTSSTVSLIVSKHDNKFETLSKNQKILFKNANEKEVIAKSIGIQNLKVFEKYIVSALGEVTKAEFRQREDFKK

SEQ ID NO: 102 - protein, 984 aa, Campylobacter coli
  source 1..984: note = 59-2
MARILAFDIGISSIGWAFSENDELKDCGVRIFTKAENPKTGESLALPRRLARSARKRLARRKARLNHLKHLIANEFKLNYEDYQSFDESLAKAYKGSLISPYELRFRALNELLSKQDFARVILHIAKRRGYDDIKNNGDEEKGKILKAIKQNEEKLVNYQSVGEYLYKEYFQKFKENSKEFINVRNKKESYERCITQSFLKYELKLIFQKQREFGFSFSKKFEEEVLSVAFYKRALKDFSHLVGNCSFFSDEKRAPKNSPLAFMFVALTRIINLLNNLKNTEGILYTKDDLNALLNEVLKNGTLTYKQTKKLLGLSDDYEFKGEKGTYFIEFKKYKEFIKALGEHNLSQDDLNEIAKDITLIKDEIKLKKALAKYDLNQNQIDSLSKLEFKDHLNISFKALKLITPLMLEGKKYDEACNELNLKVAINEDKKDFLPAFNETYYKDEVTNPVVLRAIKEYRKVLNALLKKYGKVHKINIELAREVGKNYSQRAKIEKEQNENYKAKKDAELECEKLGLKINSKNILKLRLFKEQKEFCAYSGEKIKISDLQDEKMLEIDHIYPYSRSFDDSYMNKVLVFTKQNQEKLNQTPFEAFGNDSAKWQKIEVLAKNLPTKKQKRILDKNYKDKEQKNFKDRNLNDTRYIARLVLNYTKDYLDFLPLSDDENTKLNDTQKGSKVHVEAKSGMLTSALRHTWGFSAKDRNNHLHHAIDAVIIAYANNSIVKAFSDFKKEQESNSAELYAKKISELDYKNKRKFFEPFSGFRQKVLDKIDEIFVSKPERKKPSGALHEETFRKEEEFYQSYGGKEGVLKALELGKIRKVNGKIVKNGDMFRVDIFKHKKTNKFYAVPIYTMDFALKVLPNKAVARSKKGEIKDWILMDENYEFCFSLYKDSLILIQTKDMQEPEFVYYNAFTSSTVSLIVSKHDNKFETLSKNQKILFKNANEKEVIAKSIGIQNLKVFEKYIVSALGEVTKAEFRQREDFKK

SEQ ID NO: 103 - protein, 965 aa, Campylobacter coli
  source 1..965: note = 67-8
MKIIGFNLGIANIGWALRENDEIIDCGVRVFDIPENPKNGNSLALERRENKARMKIVKRKKARMLATKTFLKKELNVDLSKLFLIGSTQSIYELRTKALSSLISKEELSAIILHIAKHRGYDDSALKNENGTIIEALNKNKEAMLKFKSVGEYFYKNFVQNKEVKKIRNTTEDYSNSVPRSLLKQELDLILDKQKELGLIKNADFKAKLFEIIFFKRPLKDFSNKIGNCIFFENEKRAAKNTISACEFVALGKVVNLLKSIEKDIGIVYEKDSINEIMSIILDKTSISYKKIRDILNLPQDINFKGLDYSKNNAENSKLVDLKKLNEFKKALGDGFANLDKDILDSIATDITLTKDTATLKEKLKNYNVLNAEQIEKLSELVFNDHINLSLKALKQIIPLMYEGKRYDEACELCNFTIAKNQEKNEYLPLFEKTRFAKDISSPVVIRAICEFRKLLNDIIRRYGSVHKIHLELTRDFGISFNDRKKIIKEIEQNEQSRIKALETIKELKLEETSKNIQIVRLFEDQKGICPYSGLKMDLKCLDELVIDYIRPYNRSLDDSYSNKVLTFKKLNDLKQGKTPFEAFGEDEKLWAEINERIKEYNGKKRFKIFDKFFKDKKPFDFTEQTLQDTRWLTKLVASYLNEYLSFLPISEDENTALGYGEKGSKQHVVLSSGMITQMLRNFWYLGFKNHKNYKNNAMDAIIVAFTTNSIIFAFNNFKKELDLAKAEFYANKISESDYLLKRKFLPPFSGFKEQALEKVKNIFVSHSLKIKNKGTLHELTPLKIKELKNTYGDLDLAVKLGKIRKYNDKYYANTKGSLVRTDLFVDKENKFHAVSIYKADFSTKKLPNKTPATTSNGETKEGIEMNENYNFCMSLYKNTPVSVKIKGMKEPIICYYHGFNTSGSKITYKKHDNNYHNLSEDEMVVFRKNDKESIVVGKILEIKKYSISPSGELSLIENEKRKWF

SEQ ID NO: 104 - protein, 965 aa, Campylobacter coli
  source 1..965: note = 80352
MKIIGFNLGIANIGWALRENDEIIDCGVRVFDIPENPKNGNSLALERRENKARMKIVKRKKARMLATKTFLKKELNVDLSKLFLIGSTQSIYELRTKALSSLISKEELSAIILHIAKHRGYDDSALKNENGTIIEALNKNKEAMLKFKSVGEYFYKNFVQNKEVKKIRNTTEDYSNSVPRSLLKQELDLILDKQKELGLIKNADFKAKLFEIIFFKRPLKDFSNKIGNCIFFENEKRAAKNTISACEFVALGKVVNLLKSIEKDIGIVYEKDSINEIMSIILDKTSISYKKIRDILNLPQDINFKGLDYSKNNVENSKLVDLKKLNEFKKALGDGFTNLDKDILDSIATDITLTKDTATLKEKLKNYNVLNAEQIEKLSELVFNDHINLSLKALKQIIPLMYEGKRYDEACELCNFTIAKNQEKNEYLPLFEKTRFAKDISSPVVIRAICEFRKLLNDIIRRYGSVHKIHLELTRDFGISFNDRKKIIKEIEQNEQSRIKALETIKELKLEETSKNIQIVRLFEDQKGICPYSGLKMDLKCLDELVIDYIRPYNRSLDDSYSNKVLTFKKLNDLKQGKTPFEAFGEDEKLWAEINERIKEYNGKKRFKIFDKFFKDKKPFDFTEQTLQDTRWLTKLVASYLNEYLSFLPISEDENTALGYGEKGSKQHVILSSGMITQMLRNFWYLGFKNHKDYKNNAMDAIIVAFTTNSIIFTFNNFKKELDLAKAEFYANKISESDYLLKRKFLPPFSGFKEQALEKVKNIFVSHSLKIKNKGTLHELTPLKIKELKNTYGDLDLAVKLGKIRKYNDKYYANAKGSLVRTDLFADKENKFHAVSIYKADFSTKKLPNKTPATTSNGETKEGIEMNENYNFCMSLYKNTPISVKIKGMKEPIICYYHGFNTSGSKITYKKHDNNYHNLSEDEMVVFRKNDKESIVVGKILEIKKYSISPSGELSLIENEERKWF

SEQ ID NO: 105 - protein, 987 aa, Campylobacter coli
  source 1..987: note = 80352
MARILAFDIGISSIGWAFSENDELKDCGVRIFTKAENPKTGESLALPRRLARSARKRLARRKARLNHLKHLIANEFKLNYEDYQSFDESLAKAYKGSLISPYELRFRALNELLSKQDFARVILHIAKRRGYDDIKNSDDKEKGAILKAIKQNEEKLANYQSVGEYLYKEYFQKFKENSKEFTNVRNKKESYERCIAQSFLKDELKLIFKKQREFGFSFSKKFEEEVLSVAFYKRALKDFSHLVGNCSFFTDEKRAPKNSPLAFMFVALTRIINLLNNLKNTEGILYTKDDLNALLNEVLKNGTLTYKQTKKLLGLSDDYEFKGEKGTYFIEFKKYKEFIKALGDHSLSQDDLNEIAKDITLIKDEIKLKKALAKYDLNQNQIDSLSKLEFKDHLNISFKALKLITPLMLEGKKYDEACNELNLKVAINEDKKDFLPAFNETYYKDEVTNPVVLRAIKEYRKVLNALLKKYGKVHKINIELAREVGKNYSQRAKIEKEQNENYKAKKDAELECEKLGLKINSKNILKLRLFKEQKEFCAYSGEKIKISDLQDEKMLEIDHIYPYSRSFDDSYMNKVLVFTKQNQEKLNKTPFEAFGNDSTKWQKIEVLAKNLPEKKQKRILDKNYKDKEQKDFKDRNLNDTRYIARLVLNYTKDYLDFLPLSDDENTKLNDTQKGSKVHVEAKSGMLTSALRHTWGFSTKDRNNHLHHAIDAVIIAYANNSIVKAFSDFKKEQESNSAELYAKKISELDYKNKRKFFEPFSGFRQKVLDKIDEIFVSKPERKKPSGALHEETFRKEEEFYQSYGGKEGVLKALELGKIRKVNGKIVKNGDMFRVDIFKHKKTNKFYAVPIYTMDFALKVLPNKAVARSKKGEIKDWILMDENYEFCFSLYKDSLILIQTKDMQEPEFVYYNAFTSSTVSLIVSKHDNKFETLSKNQKILFKNANEKEVIAKSIGIQNLKVFEKYIVSALGEVTKAEFRQREDFKNELR

SEQ ID NO: 106 - protein, 984 aa, Campylobacter jejuni
MAKILAFDIGISSIGWAFSENDELKDCGVRIFTKAENPKTGESLALPRRIARSARKRLARRKARLNHLKHLIANEFKLNYEDYQSFDEILAKAYKGSLISPYELRFRALNELLSKQDFARVILHIAKRRGYDDIKNNGDEEKGKILKAIKQNEEKLANYQSVGEYLYKEYFQKFKENSKEFINVRNKKESYERCIAQSFLKDELKLIFKKQREFGFSFSKKFEEEVLSVAFYKRALKDFSHLVGNCSFFTDEKRAPKNSPLAFMFVALTRIINLLNNLKNTLYTKDDLNALLNEVLKNGTLTYKQTKKLLGLSDDYEFKGEKGNYFIEFKKYKEFIKALGEHSLSQDDLNEIAKDITLIKDEIKLKKALAKYDLNENQIDNLSKLEFKDHLNISFKALKLITPLMLEGKKYDEACNELTLKVAINEDKKDFLPAFNETYYKDEVTNPVVLRAIKEYRKVLNALLKKYGKVHKINIELAREVGKNHSQRAKIEKEQNENYKAKKDAELECEKLGLKINSKNILKLRLFKEQKEFCVYSGEKIKLSDLQDEKMLEIDHIYPYSRSFDDSYMNKVLVFTKQNQEKLNQTPFEAFGNDSAKWQKIEVLAKNLPTKKQKRILDKNYKDKEQKDFKDRNLNDTRYIARLVLNYTKDYLDFLPLSDDENTKLNDTQKGSKVHVEAKSGMLTSALRHTWGFSTKDRNNHLHHAIDAVIIAYANNSIVKAFSDFKKEQESNTAELYAKKISELDYKNKRKFFEPFSGFRQKVLDKIDEIFVSKPERKKPSGALHEETFRKEEEFYQSYGGKEGVLKALELGKIRKVNGKIVKNGDMFRVDIFKHKKTNKFYAVPIYTMDFALKVLPNKAVARSKKGEIKDWILMDENYEFCFSLYKDSLILIQTKDMQEPEFVYYNAFTSSTVSLIVSKHDNKFETLSKNQKILFKNANEKEVIAKSIGIQNLKVFEKYIVSALGEVTKAEFRQREEFKNELR

SEQ ID NO: 107 - protein, 987 aa, Campylobacter jejuni
  source 1..987: note = subsp. jejuni 110-21
MARILAFDIGISSIGWAFSENDELKDCGVRIFTKAENPKTGESLALPRRLARSARKRLARRKARLNHLKHLIANEFKLNYEDYQSFDESLAKAYKGSLISPYELRFRALNELLSKQDFARVILHIAKRRGYDNIKNSDNEEKSEILKAIKQNEEKLVNYQSVGEYLYKEYFQKFKENSKEFINVRNKKESYERCIAQSFLKDELKLIFQKQREFGLSFSKKFEEEVLSVAFYKRALKDFSHLVGNCSFFTDEKRAPKNSPLAFMFVALTRIINLLNNLKNTEGILYTKDDLNTLLNEVLKNGTLTYKQTKKLLGLSDDYEFKGEKGTYFIEFKKYKEFIKALGDHSLSQDDLNEIAKDITLIKDEIKLKKALAKYDLNQNQIDSLSKLEFKDHLNISFKALKLITPLMLEGKKYDEACNELNLKVVINEDKKDFLPAFNETYYKDEVTNPVVLRAIKEYRKVLNALLKKYGKVHKINIELAREVGKNHSQRAKIEKEQNENYKAKKDAELECEKLGLKINNKNILKLRLFKEQKEFCAYSGEKIKLSDLQDEKMLEIDHIYPYSRSFDDSYMNKVLVFTKQNQEKLNKTPFEAFGNDSTKWQKIEVLAKNLPTKKQKRILDKNYKDKEQKDFKDRNLNDTRYIARLVLNYTKDYLDFLPLSDDENTKLNDIQKGSKVHVEAKSGMLTSALRHTWGFSTKDRNNHLHHAIDAVIIAYANNSIVKAFSDFKKEQESNSAELYAKKISELDYKNKRKFFEPFSGFRQKVLDKIDEIFVSKPERKKPSGALHEETFRKEEEFYQSYGGKEGVLKALELGKIRKVNGKIVKNGDMFRVDIFKHKKTNKFYAVPIYTMDFALKVLPNKAVVQGKDKKSGLIKDWILMDENYEFCFSLYKDSLILIQTKDMQEPEFVYYNAFTSSTVSLIVSKHDNKFETLSKNQKILFKNANEKEVIAKSIGIQNLKVFEKYIVSALGEVTKAEFRQREDFKK

SEQ ID NO: 108 - protein, 987 aa, Campylobacter jejuni
  source 1..987: note = subsp. jejuni 129-258
MARILAFDIGISSIGWAFSENDELKDCGVRIFTKAENPKTGESLALPRRLARSARKRLARRKARLNHLKHLIANEFKLNYEDYQSFNESLAKAYKGSLISPYELRFRALNELLSKQDFARVILHIAKRRGYDDIKNSDDKEKGAILKVIKQNEEKLANYQSVGEYLYKEYFQKFKENSKEFTNVRNKKESYERCIAQSFLKDELKLIFQKQREFGFSFSKKFEEEVLSVAFYKRALKDFSHLVGNCSFFTDEKRAPKNSPLAFMFVALTRIINLLNNLKNTEGILYTKDDLNALLNEVLKNGTLTYKQTKKLLGLSDDYEFKGEKGTYFIEFKKYKEFIKALGDHSLSQDDLNEIAKDITLIKDEIKLKKALAKYDLNQNQIDSLSKLEFKDHLNISFKALKLITPLMLEGKKYDEACNELNLKVAINEDKKDFLPAFNETYYKDEVTNPVVLRAIKEYRKVLNALLKKYGKVHKINIELAREVGKNYSQRAKIEKEQNENYKAKKDAELECEKLGLKINSKNILKLRLFKEQKEFCAYSGEKIKISDLQDEKMLEIDHIYPYSRSFDDSYMNKVLVFTKQNQEKLNQTPFEAFGNDSAKWQKIEVLAKNLPTKKQKRILDKNYKDKEQKDFKDRNLNDTRYIARLVLNYTKDYLDFLPLSDDENTKLNDTQKGSKVHVEAKSGMLTSALRHTWGFSAKDRNNHLHHAIDAVIIAYANNSIVKAFSDFKKEQESNSAELYAKKISELDYKNKRKFFEPFSGFRQKVLDKIDEIFVSKPERKKPSGALHEETFRKEEEFYQSYGGKEGVLKALELGKIRKVNGKIVKNGDMFRVDIFKHKKTNKFYAVPIYTMDFALKVLPNKAVARSKKGEIKDWILMDENYEFCFSLYKDSLILIQTKDMQEPELVYFNAFTSSTVSLIVSKHDNKFETLSKNQKILFKNANEKEVIAKSIGIQNLKVFEKYIVSALGEVTKAEFRQREDFKNELR

SEQ ID NO: 109 - protein, 987 aa, Campylobacter jejuni
  source 1..987: note = subsp. jejuni 1336
MARILAFDIGISSIGWAFSENDELKDCGVRIFTKAENPKTGESLALPRRLARSARKRLARRKARLNHLKHLIANEFKLNYEDYQSFDESLAKAYKGSLISPYELRFRALNELLSKQDFARVILHIAKRRGYDDIKNNGDEEKGKILKAIKQNEEKLVSYQSVGEYLYKEYFQKFKENSKEFINVRNKKESYERCIAQSFLKDELKLIFQKQREFGFSFSKKFEEEVLSVAFYKRALKDFSHLVGNCSFLLMKKERQKNSPLAFMFVALTRIINLLNNLKNTEGILYTKDDLNTLLNEALKNGTLTYKQTKKLLGLSNDYEFKGEKGTYFIEFQKYKEFVKALGEHNLSQDDLNEIAKDITLIKDEIKLKKALAKYDLNQNQIDSLSKLEFKDHLNISFKALKLITPLMLEGKKYDEACNELNLKVAINEDKKDFLPAFNETYYKDEVTNPVVLRAIKEYRKVLNALLKKYGKVHKINIELAREVGKNHSQRAKIEKEQNENYKAKKDAELECEKLGLKINSKNILKLRLFKEQKEFCVYSGEKIKISDLQDEKMLEIDHIYPYSRSFDDSYMNKVLVFTKQNQEKLNKTPFETFGNDRVKWQKIEVLAKNLPTKKQKRILDKNYKDKEQKDFKDRNLNDTRYIARLVLNYTKDYLDFLPLSDDENTKLNDTQKGSKVHVEAKSGMLTSTLRHTWGFSTKDRNNHLHHAIDAAIIAYANNSIVKAFSDFKKEQESNTAELYAKKISELDYKNKRKFFEPFSGFRQKLLDKIDEIFVSKPERKKPSGALHEETFRKEEEFYQSYGGKEGVLKALELGKIRKVNGKMVKNGDMFRVDIFKHKKTNKFYAVPIYTMDFALKVLPNKAVVQGKDKKSGLIKDWILMDENYEFCFSLYKDSLILIQTKDMQEPELVYYERLDSSNASLTVSKHDNKFETLSKNQKILFKNANEKEVIAKSIGIQNLKVFEKYIVSALGEVTKAEFRQREDFKK

SEQ ID NO: 110 - protein, 984 aa, Campylobacter jejuni
  source 1..984: note = subsp. jejuni 140-16
MARILAFDIGISSIGWAFSENDELKDCGVRIFTKVENPKTGESLALPRRLARSARKRLARRKARLNHLKHLIANEFKLNYEDYQSFDESLAKAYKGSLISPYELRFRALNELLSKQDFARVILHIAKRRGYDDIKNSDDKEKGAILKAIKQNEEKLANYQSVGEYLYKEYFQKFKENSKEFTNVRNKKESYERCIAQSFLKDELKLIFKKQREFGFSFSKKFEEEVLSVAFYKRALKDFSHLVGNCSFFTDEKRAPKNSPLAFMFVALTRIINLLNNLKNTEGILYTKDDLNALLNEVLKNGTLTYKQTKKLLGLSDDYEFKGEKGTYFIEFKKYKEFIKALGEHNLSQDDLNEIAKDITLIKDEIKLKKALAKYDLNQNQIDSLSKLEFKDHLNISFKALKLITPLMLEGKKYDEACNELNLKVAINEDKKDFLPAFNETYYKDEVTNPVVLRAIKEYRKVLNALLKKYGKVHKINIELAREVGKNHSQRAKIEKEQNENYKAKKDAELECEKLGLKINSKNILKLRLFKEQKEFCAYSGEKIKISDLQDEKMLEIDHIYPYSRSFDDSYMNKVLVFTKQNQEKLNKTPFEAFGNDSAKWQKIEVLAKNLPTKKQKRILDKNYKDKEQKDFKDRNLNDTRYIARLVLNYTKDYLDFLPLSDDENTKLNDTQKGSKVHVEAKSGMLTSALRHTWGFSTKDRNNHLHHAIDAVIIAYANNSIVKAFSDFKKEQESNSAELYAKKISELDYKNKRKFFEPFSGFRQKVLDKIDEIFVSKPERKKPSGALHEETFRKEEEFYQSYGGKEGVLKALELGKIRKVNGKIVKNGDMFRVDIFKHKKTNKFYAVPIYTMDFALKVLPNKAVARSKKGEIKDWILMDENYEFCFSLYKDSLILIQTKDMQEPEFVYYNAFTSSTVSLIVSKHDNKFETLSKNQKILFKNANEKEVIAKSIGIQNLKVFEKYIVSALGEVTKAEFIQREDFKK

SEQ ID NO: 111 - protein, 984 aa, Campylobacter jejuni
  source 1..984: note = subsp. jejuni 1577
MARILAFDIGISSIGWAFSENDELKDCGVRIFTKVENPKTGESLALPRRLARSARKRLARRKVRLNHLKHLIANEFKLNYEDYQSFDESLAKAYKGSLISPYELRFRALNELLSKQDFARVILHIAKRRGYDDIKNSDDKEKGAILKAIKQNEEKLANYQSVGEYLYKEYFQKFKENSKEFTNVRNKKESYERCIAQSFLKDELKLIFKKQREFGFSFSKKFEEEVLSVAFYKRALKDFSHLVGNCSFFTDEKRAPKNSPLAFMFVALTRIINLLNNLKNTEGILYTKDDLNALLNEVLKNGTLTYKQTKKLLGLSDDYEFKGEKGTYFIEFKKYKEFIKALGEHNLSQDDLNEIAKDITLIKDEIKLKKALAKYDLNQNQIDSLSKLEFKDHLNISFKALKLITPLMLEGKKYDEACNELNLKVAINEDKKDFLPAFNETYYKDEVTNPVVLRAIKEYRKVLNALLKKYGKVHKINIELAREVGKNHSQRAKIEKEQNENYKAKKDAELECEKLGLKINSKNILKLRLFKEQKEFCAYSGEKIKISDLQDEKMLEIDHIYPYSRSFDDSYMNKVLVFTKQNQEKLNKTPFEAFGNDSAKWQKIEVLAKNLPTKKQKRILDKNYKDKEQKDFKDRNLNDTRYIARLVLNYTKDYLDFLPLSDDENTKLNDTQKGSKVHVEAKSGMLTSALRHTWGFSTKDRNNHLHHAIDAVIIAYANNSIVKAFSDFKKEQESNSAELYAKKISELDYKNKRKFFEPFSGFRQKVLDKIDEIFVSKPERKKPSGALHEETFRKEEEFYQSYGGKEGVLKALELGKIRKVNGKIVKNGDMFRVDIFKHKKTNKFYAVPIYTMDFALKVLPNKAVARSKKGEIKDWILMDENYEFCFSLYKDSLILIQTKDMQEPEFVYYNAFTSSTVSLIVSKHDNKFETLSKNQKILFKNANEKEVIAKSIGIQNLKVFEKYIVSALGEVTKAEFRQREDFKK

SEQ ID NO: 112 - protein, 987 aa, Campylobacter jejuni
  source 1..987: note = subsp. jejuni 1854
MARILAFDIGISSIGWAFSENDELKDCGVRIFTKAENPKTGESLALPRRLARSARKRLARRKARLNHLKHLIANEFKLNYEDYQSFDESLAKAYKGSLISPYELRFRALNELLSKQDFARVILHIAKRRGYDDIKNSDDKEKGAILKAIKQNEEKLANYQSVGEYLYKEYFQKFKENSKEFTNVRNKKESYERCIAQSFLKDELKLIFKKQREFGFSFSKKFEEEVLSVAFYKRALKDFSHLVGNCSFFTDEKRAPKNSPLAFMFVALTRIINLLNNLKNTEGILYTKDDLNTLLNEVLKNGTLTYKQTKKLLGLSDDYEFKGEKGTYFIEFKKYKEFIKSLGDHSLSQDDLNEIAKDITLIKDEIKLKKALAKYDLNQNQIDSLSKLEFKDHLNISFKALKLITPLMLEGKKYDEACNELNLKVAINEDKKDFLPAFNETYYKDEVTNPVVLRAIKEYRKVLNALLKKYGKVHKINIELAREVGKNHSQRAKIEKEQNENYKAKKDAELECEKLGLKINSKNILKLRLFKEQKEFCAYSGEKIKISDLQDEKMLEIDHIYPYSRSFDDSYMNKVLVFTKQNQEKLNQTPFEAFGNDSAKWQKIEVLAKNLPTKKQKRILDKNYKDKEQKNFKDRNLNDTRYIARLVLNYTKDYLDFLPLSDDENTKLNDTQKGSKVHVEAKSGMLTSALRHTWGFSAKDRNNHLHHAIDAVIIAYANNSIVKAFSDFKKEQESNSAELYAKKISELDYKNKRKFFEPFSGFRQKVLDKIDEIFVSKPERKKPSGALHEETFRKEEEFYQSYGGKEGVLKALELGKIRKVNGKIVKNGDMFRVDIFKHKKTNKFYAVPIYTMDFALKVLPNKAVARSKKGEIKDWILMDENYEFCFSLYKDSLILIQTKDMQEPEFVYYNAFTSSTVSLIVSKHDNKFETLSKNQKILFKNANEKEVIAKSIGIQNLKVFEKYIVSALGEVTKAEFRQREDFKNELR

SEQ ID NO: 113 - protein, 984 aa, Campylobacter jejuni
  source 1..984: note = subsp. jejuni 1997-10
MARILAFDIGISSIGWAFSENDELKDCGVRIFTKAENPKTGESLALPRRLARSARKRLARRKARLNRLKHLIANEFKLNYEDYQSFDESLAKAYKGSLISPYELRFRALNELLSKQDFARVILHIAKRRGYDDIKNSDDKEKGAILKAIKQNEEKLANYQSVGEYLYKEYFQKFKENSKEFTNVRNKKESYERCIAQSFLKDELKLIFKKQREFGFSFSKKFEEEVLSVAFYKRALKDFSHLVGNCSFFTDEKRAPKNSPLAFMFVALTRIINLLNNLKNTEGILYTKDDLNALLNEVLKNGTLTYKQTKKLLGLSDDYEFKGEKGTYFIEFKKYKEFIKALGDHSLNQDDLNEIAKDITLIKDEIKLKKALAKYDLNQNQIDSLSKLEFKDHLNISFKALKLITPLMLEGKKYDEACNELNLKVAINEDKKDFLPAFNETYYKDEVTNPVVLRAIKEYRKVLNALLKKYGKVHKINIELAREVGKNYSQRAKIEKEQNENYKAKKDAELECEKLGLKINSKNILKLRLFKEQKEFCVYSGEKIKISDLQDEKMLEIDHIYPYSRSFDDSYMNKVLVFTKQNQEKLNQTPFEAFGNDSAKWQKIEVLAKNLPTKKQKRILDKNYKDKEQKDFKDRNLNDTRYIARLVLNYTKDYLDFLPLSDDENTKLNDTQKGSKVYVEAKSGMLTSALRHTWGFSTKDRNNHLHHAIDAVIIAYANNSIVKAFSDFKKEQESNSAELYAKKISELDYKNKRKFFEPFSGFRQKVLDKIDEIFVSKPERKKPSGALHEETFRKEEEFYQSYGGKEGVLKALELGKIRKVNGKIVKNGDMFRVDIFKHKKTNKFYAVPIYTMDFALKVLPNKAVARSKKGEIKDWILMDENYEFCFSLYKDSLILIQTKDMQEPEFVYYNAFTSSTVSLIVSKHDNKFETLSKNQKILFKNANEKEVIAKSIGIQNLKVFEKYIVSALGEVTKAEFRQREDFKK

SEQ ID NO: 114 - protein, 987 aa, Campylobacter jejuni
  source 1..987: note = subsp. jejuni 2008-1025
MARILAFDIGISSIGWAFSENDELKDCGVRIFTKAENPKTGESLALPRRLARSARKRLARRKARLNHLKHLIANEFKLNYEDYQSFDESLAKAYKGSLISPYELRFRALNELLSKQDFARVILHIAKRRGYDDIKNNGDEEKSEILKAIKQNEEKLVNYQSVGEYLYKEYFQKFKENSKEFINVRNKKESYERCIAQSFLKDELKLIFQKQREFGFSFSKKFEEEVLSVAFYKRALKDFSHLVGNCSFFTDEKRAPKNSPLAFMFVALTRIINLLNNLKNTEGILYTKDDLNTLLNEVLKNGTLTYKQTKKLLGLSDDYEFKGEKGTYFIEFKKYKEFIKALGEHNLSQDNLNEIAKDITLIKDEIKLKKALAKYDLNQNQIDSLSKLEFKDHLNISFKALKLITPLMLEGKKYDEAYNELNLKVAINEDKKDFLPAFNETYYKDEVTNPVVLRAIKEYRKVLNALLKKYGKVHKINIELAREVGKNHSQRAKIEKEQNENYKAKKDAELECEKLGLKINSKNILKLRLFKEQKEFCAYSGEKIKISDLQDEKMLEIDHIYPYSRSFDDSYMNKVLVFTKQNQEKLNQTPFEAFGNDSAKWQKIEVLAKNLPTKKQKRILDKNYKDKEQKDFKDRNLNDTRYIARLVLNYTKDYLDFLPLSDDENTKLNDTQKGSKVHVEAKSGMLTSALRHTWGFSAKDRNNHLHHAIDAVIIAYANNSIVKAFSDFKKEQESNSAELYAKKISELDYKNKRKFFEPFSGFRQKVLDKIDEIFVSKPERKKPSGALHEETFRKEEEFYQSYGGKEGVLKALELGKIRKVNGKIVKNGDMFRVDIFKHKKTNKFYAVPIYTMDFALKVLPNKAVVQGKDKKSGLIKDWILMDENYEFCFSLYKDSLILIQTKDMQEPELVYFNAFTSSTVSLIVSKHDNKFETLSKNQKILFKNANEKEVIAKSIGIQNLKVFEKYIVSALGEVTKAEFRQREDFKK

SEQ ID NO: 115 - protein, 984 aa, Campylobacter jejuni
  source 1..984: note = subsp. jejuni 2008-872
MARILAFDIGISSIGWAFSENDELKDCGVRIFTKVENPKTGESLALPRRLARSARKRLARRKARLNHLKHLIANEFKLNYEDYQSFDESLAKAYKGSLISPYELRFRALNELLSKQDFARVILHIAKRRGYDDIKNSDDKEKGAILKAIKQNEEKLANYQSVGEYLYKEYFQKFKENSKEFTNVRNKKESYERCIAQSFLKDELKLIFKKQREFGFSFSKKFEEEVLSVAFYKRALKDFSHLVGNCSFFTDEKRAPKNSPLAFMFVALTRIINLLNNLKNTEGILYTKDDLNALLNEVLKNGTLTYKQTKKLLGLSDDYEFKGEKGTYFIEFKKYKEFIKALGEHNLSQDDLNEIAKDITLIKDEIKLKKALAKYDLNQNQIDSLSKLEFKDHLNISFKALKLITPLMLEGKKYDEACNELNLKVAINEDKKDFLPAFNETYYKDEVTNPVVLRAIKEYRKVLNALLKKYGKVHKINIELAREVGKNHSQRAKIEKEQNENYKAKKDAELECEKLGLKINSKNILKLRLFKEQKEFCAYSGEKIKISDLQDEKMLEIDHIYPYSRSFDDSYMNKVLVFTKQNQEKLNKTPFEAFGNDSAKWQKIEVLAKNLPTKKQKRILDKNYKDKEQKDFKDRNLNDTRYIARLVLNYTKDYLDFLPLSDDENTKLNDTQKGSKVHVEAKSGMLTSALRHTWGFSTKDRNNHLHHAIDAVIIAYANNSIVKAFSDFKKEQESNSAELYAKKISELDYKNKRKFFEPFSGFRQKVLDKIDEIFVSKPERKKPSGALHEETFRKEEEFYQSYGGKEGVLKALELGKIRKVNGKIVKNGDMFRVDIFKHKKTNKFYAVPIYTMDFALKVLPNKAVARSKKGEIKDWILMDENYEFCFSLYKDSLILIQTKDMQEPEFVYYNAFTSSTVSLIVSKHDNKFETLSKNQKILFKNANEKEVIAKSIGIQNLKVFEKYIVSALGEVTKAEFRQREDFKK

SEQ ID NO: 116 - protein, 987 aa, Campylobacter jejuni
  source 1..987: note = subsp. jejuni 2008-979
MARILAFDIGISSIGWAFSENDELKDCGVRIFTKAENPKTGESLALPRRLARSARKRLARRKARLNHLKHLIANEFKLNYEDYQSFDESLAKAYKGSLISPYELRFRALNELLSKQDFARVILHIAKRRGYDDIKNSDDKEKGAILKAIKQNEEKLVNYQSVGEYLYKEYFQKFKENSKEFTNVRNKKESYERCIAQSFLKDELKLIFKKQREFGFSFSKKFEEEVLSVAFYKRALKDFSHLVGNCSFFTDEKRAPKNSPLAFMFVALTRIINLLNNLKNTEGILYTKDDLNALLNEVLKNGTLTYKQTKKLLGLSDDYEFKGEKGTYFIEFKKYKEFIKALGDHSLSQDDLNEIAKDITLIKDEIKLKKALAKYDLNQNQIDSLSKLEFKDHLNISFKALKLITPLMLEGKKYDEACNELNLKVAINEDKKDFLPAFNETYYKDEVTNPVVLRAIKEYRKVLNALLKKYGKVHKINIELAREVGKNYSQRAKIEKEQNENYKAKKDAELECEKLGLKINSKNILKLRLFKEQKEFCAYSGEKIKISDLQDEKMLEIDHIYPYSRSFDDSYMNKVLVFTKQNQEKLNQTPFEAFGNDSAKWQKIEVLAKNLPTKKQKRILDKNYKDKEQKDFKDRNLNDTRYIARLVLNYTKDYLDFLPLSDDENTKLNDTQKGSKVHVEAKSGMLTSALRHTWGFSAKDRNNHLHHAIDAVIIAYANNSIVKAFSDFKKEQESNSAELYAKKISELDYKNKRKFFEPFSGFRQKVLDKIDEIFVSKPERKKPSGALHEETFRKEEEFYQSYGGKEGVLKALELGKIRKVNGKIVKNGDMFRVDIFKHKKTNKFYAVPIYTMDFALKVLPNKAVARSEKGEIKDWILMDENYEFCFSLYKDSLILIQTKDMQEPELVYFNAFTSSTVSLIVSKHDNKFETLSKNQKILFKNANEKEVIAKSIGIQNLKVFEKYIVSALGEVTKAEFRQREDFKNELR

SEQ ID NO: 117 - protein, 965 aa, Campylobacter jejuni
  source 1..965: note = subsp. jejuni 2008-988
MKIIGFNLGIANIGWALRENDEIIDCGVRVFDIPENPKNGNSLALERRENKARMKIVKRKKARMLATKTFLKKELNVDLSKLFLIGSTQSIYELRAKALSSLISKEELSAIILHIAKHRGYDDSALKNENGTIIEALNKNKETMLKFKSVGEYFYKNFVQNKEVKKIRNTTEDYSNSVPRSLLKQELDLILDKQKELGLIKNADFKEKLFEIIFFKRPLKDFSNKIGNCIFFENEKRAAKNTISACEFVALGKVVNLLKSIEKDIGIVYEKDSINEIMSIILDKTSISYKKIRDILNLPQEINFKGLDYSKNNVENSKLVDLKKLNEFKKALGDGFANLDKDILDSIATDITLTKDTATLKEKLKNYNVLNAEQIEKLSELVFNDHINLSLKALKQIIPLMYEGKRYDEACELCNFTIAKNQEKSEYLPLFEKTRFAKDISSPVVIRAICEFRKLLNDIIRRYGSVHKIHLELTRDFGISFSDRKKIIKEIEQNEQSRIKALETIKELKLEETSKNIQIVRLFEDQKGICPYSGLKMDLNRLDELVIDYIRPYNRSLDDSYSNKVLTFKKLSDLKQGKTPFEAFGEDEKLWAEINERIKEYNGKKRFKIFDKFFKDKKPFDFTEQTLQDTRWLTKLVASYLNEYLSFLPISEDENTALGYGEKGSKQHVILSSGMITQMLRNFWYLGFKNHKDYKNNAMDAIIVAFTTNSIIFAFNNFKKELDLAKAEFYANKISESDYLLKRKFLPPFSGFKEQALEKVKNIFVSHSLKIKNKGTLHDLTPLKIKELKNTYGDLDLAVKLGKIRKYNDKYYANANGSLVRADLFVDKKNKFHAVSIYKADFSTKKLPNKTPATTSNGETKEGIEMNENYNFCMSLYKNTPISVKIKGMKEPIICYYHGFNTSGSKITYKKHDNNYHNLSEDEMVVFRKNDKESIAVGKILEIKKYSISPSGELSLIENEERKWF

SEQ ID NO: 118 - protein, 984 aa, Campylobacter jejuni
  source 1..984: note = subsp. jejuni 2008-988
MARILAFDIGISSIGWAFSENDELKDCGVRIFTKVENPKTGESLALPRRLARSARKRLARRKARLNHLKHLIANEFKLNYEDYQSFDESLAKAYKGSLISPYELRFRALNELLSKQDFARVILHIAKRRGYDDIKNSDDKEKGAILKAIKQNEEKLANYQSVGEYLYKEYFQKFKENSKEFTNVRNKKESYERCIAQSFLKDELKLIFKKQREFGFSFSKKFEEEVLSVAFYKRALKDFSHLVGNCSFFTDEKRAPKNSPLAFMFVTLTRIINLLNNLKNTEGILYTKDDLNALLNEVLKNGTLTYKQTKKLLGLSDDYEFKGEKGTYFIEFKKYKEFIKALGEHNLSQDDLNEIAKDITLIKDEIKLKKALAKYDLNQNQIDSLSKLEFKDHLNISFKALKLITPLMLEGKKYDEACNELNLKVAINEDKKDFLPAFNETYYKDEVTNPVVLRAIKEYRKVLNALLKKYGKVHKINIELAREVGKNHSQRAKIEKEQNENYKAKKDAELECEKLGLKINSKNILKLRLFKEQKEFCAYSGEKIKISDLQDEKMLEIDHIYPYSRSFDDSYMNKVLVFTKQNQEKLNKTPFEAFGNDSAKWQKIEVLAKNLPTKKQKRILDKNYKDKEQKDFKDRNLNDTRYIARLVLNYTKDYLDFLPLSDDENTKLNDTQKGSKVHVEAKSGMLTSALRHTWGFSTKDRNNHLHHAIDAVIIAYANNSIVKAFSDFKKEQESNSAELYAKKISELDYKNKRKFFEPFSGFRQKVLDKIDEIFVSKPERKKPSGALHEETFRKEEEFYQSYGGKEGVLKALELGKIRKVNGKIVKNGDMFRVDIFKHKKTNKFYAVPIYTMDFALKVLPNKAVARSKKGEIKDWILMDENYEFCFSLYKDSLILIQTKDMQEPEFVYYNAFTSSTVSLIVSKHDNKFETLSKNQKILFKNANEKEVIAKSIGIQNLKVFEKYIVSALGEVTKAEFRQREDFKK

SEQ ID NO: 119 - protein, 961 aa, Campylobacter jejuni
  source 1..961: note = subsp. jejuni 260.94
MARILAFDIGISSIGWAFSENDELKDCGVRIFTKAENPKTGESLALPRRLARSARKRLARRKARLNHLKHLIANEFKLNYEDYQSFDESLAKAYKGSLISPYELRFRALNELLSKQDFARVILHIAKRRGYDDIKNNGDEEKGKILKAIKQNEEKLVNYQSVGEYLYKEYFQKFKENSKEFINVRNKKESYERCITQSFLKYELKLIFQKQREFGFSFSKKFEEEVLSVAFYKRALKDFSHLVGNCSFFSDEKRAPKNSPLAFMFVALTRIINLLNNLKNTEGILYTKDDLNALLNEVLKNGTLTYKQTKKLLGLSDDYEFKGEKGTYFIEFKKYKEFIKALGEHNLSQDDLNEIAKDITLIKDEIKLKKALAKYDLNQNQIDSLSKLEFKDHLNIGFKALKLITPLMLEGKKYDEACNELNLKVAINEDKKDFLPAFNETYYKDEVTNPVVLRAIKEYRKVLNALLKKYGKVHKINIELAREVGKNHSQRAKIEKEQNENYKAKKDAELECEKLGLKINSKNILKLRLFKEQKEFCAYSGEKIKLSDLQDEKMLEIDHIYPYSRSFDDSYMNKVLVFTKQNQEKLNKTPFEAFGNDNVKWQKIEVLAKNLPEKKQKRILDKNYKDKEQKDFKDRNLNDTRYIARLVLNYTKDYLDFLPLSDDENTKLKGSKVHVEAKSGMLTSALRHTWGFSTKDRNNHLHHAIDAAIIAYANNSIVKDFSDFKKEQESNSAELYAKKISELDYKNKRKFFEPFSGFRQKVLDKIDEIFVSKPERKKPSGALHEETFRKEEEFYQSYGGKEGVLKALELGKIRKVNGKIVKNGDMFRVDIFKHKKTNKFYAVPIYTMDFALKVLPNKAVARSKKGEIKDWILMDENYEFCFSLYKDSLILIQTKDMQEPELVYFNAFTSSTVSLIVSKHDNKFETLSKNLKVFEKYIVSALGEVTKAEFRQREDFKNELR

SEQ ID NO: 120 - protein, 985 aa, Campylobacter jejuni
  source 1..985: note = subsp. jejuni 414
MAKILAFDIGISSIGWAFVENDELKDCGVRIFTKAENPKTGESLALPRRLARSARKRLARRKARLNHLKHLIANEFKLNYEDYQSFDESLAKAYKGTLISPYELRFKALNELLSKQDLARVILHIAKRRGYDNIKNSDDKEKGAILKAVKENEEKLANYKSVGEYLYKEYFQKFKENSKEFINVRNKKESYERCIAQSFLKDELKLIFQKQREFGFNFSKKFEEEVLSVAFYKRALKDFSHLVGNCSFFVDEKRAPKNSPLAFEFVALTRIVNLLNNLNKNNSYIKDDLNALLSEVLKNGTLTYKQTKKILGLSDDYEFKGQKGNYFIEFKKYKEFIKALCEHNLNQDDLNEIAKDITLVKDETKLKKALAKYDLNQNQIENLSKIEFKDHLNISFKALKLIVPLMREGKKYDEVCNELNLKTAINEDKKEFLPAFNETYYKDEVNNPVVLRAIKEYRKVLNSLLKKYGKVHKINIELAREVGKNHRERSKIEKEQNENFKAKKDAELECEKLGLKINSKNILKLRLFKEQKEFCVYSGEKIKISDLQDEKMLEIDHIYPYSRSFDDSYMNKVLVFTKQNQEKLNKTPFEAFGKDDVKWQKIETLAKNLPAKKQKRILDKNYKDKEQKDFKDRNLNDTRYIARLVLNYTKDYLEFLPLSDDENIKLNDTQKGSKVHVEAKSGMLTSVLRHTWGFSTKDRNNHLHHAIDAVIIAYANASVVKAFSDFKKEQENYTAELYAKKINELDFKNKRKFFEPFSNFRQKVLEKIDEIFVSKPERKKPSGALHEETFYKEEEFYKEYGGKEGVLKALELGKIRKVNGKIVSNANMFRVDIFKYKKTNKFYAVPIYTMDFALGILPNKAVVGGKDKQGIIKDWLLMDENYEFCFSLYKDSLILLQTKDMQEPELVYFKSFKSSTAGLVVSKHDNKFENLNENQKKLFKSANEKKVVAEGIGIQNLKVFEKYIVSALGEITKAEIKERENFKKK

SEQ ID NO: 121 - protein, 984 aa, Campylobacter jejuni
  source 1..984: note = subsp. jejuni 51037
MARILAFDIGISSIGWAFSENDELKDCGVRIFTKAENPKTGESLALPRRLARSARKRLARRKARLNHLKHLIANEFKLNYEDYQSFDESLAKAYKGSLISPYELRFRALNELLSKQDFARVILHIVKRRGYDDIKNSDDKEKGTILKAIKQNEEKLANYQSVGEYLYKEYFQKFKENSKEFTNVRNKKESYERCIAQSFLKDELKLIFKKQREFGFSFSKKFEEEVLSVAFYKRALKDFSHLVGNCSFFTDEKRAPKNSPLAFMFVALTRIINLLNNLKNTEGILYTKDDLNTLLNEVLKNGTLTYKQTKKLLGLSDDYEFKGEKGTYFIEFKKYKEFIKALGEHNLSQDDLNEIAKDITLIKDEIKLKKALAKYDLNQNQIDSLSKLEFKDHLNISFKALKLITPLMLEGKKYDEACNELNLKVAINEDKKDFLPAFNETYYKDEVTNPVVLRAIKEYRKVLNALLKKYGKVHKINIELAREVGKNYSQRAKIEKEQNENYKAKKDAELECEKLGLKINSKNILKLRLFKEQKEFCAYSGEKIKISDLQDEKMLEIDHIYPYSRSFDDSYMNKVLVFTKQNQEKLNQTPFEAFGNDSAKWQKIEVLAKNLPTKKQKRILDKNYKDKEQKDFKDRNLNDTRYIARLVLNYTKDYLDFLPLSDDENTKLNDTQKGSKVHVEAKSGMLTSALRHTWGFSAKDRNNHLHHAIDAVIIAYANNSIVKAFSDFKKEQESNSAELYAKKISELDYKNKRKFFEPFSGFRQKVLDKIDEIFVSKPERKKPSGALHEETFRKEEEFYQSYGGKEGVLKALELGKIRKVNGKIVKNGDMFRVDIFKHKKTNKFYAVPIYTMDFALKVLPNKAVARSKKGEIKDWILMDENYEFCFSLYKDSLILIQTKDMQEPEFVYYNAFTSSTVSLIVSKHDNKFETLSKNQKILFKNANEKEVIAKSIGIQNLKVFEKYIVSALGEVTKAEFRQREDFKK

SEQ ID NO: 122 - protein, 984 aa, Campylobacter jejuni
  source 1..984: note = subsp. jejuni 51494
MARILAFDIGISSIGWAFSENDELKDCGVRIFTKAENPKTGESLALPRRLARSARKRLARRKARLNHLKHLIANEFKLNYEDYQSFDESLAKAYKGSLISPYELRFRALNELLSKQDFARVILHIAKRRGYDDIKNSDDKEKGAILKAIKQNEEKLANYQSVGEYLYKEYFQKFKENSKEFTNVRNKKESYERCIAQSFLKDELKLIFKKQREFGFSFSKKFEEEVLSVAFYKRALKDFSHLVGNCSFFTDEKRAPKNSPLAFMFVALTRIINLLNNLKNTEGILYTKDDLNTLLNEVLKNGTLTYKQTKKLLGLSDDYEFKGEKGTYFIEFKKYKEFIKALGEHNLSQDDLNEIAKDITLIKDEIKLKKALAKYDLNQNQIDSLSKLEFKDHLNISFKALKLITPLMLEGKKYDEACNELNLKVAINEDKKDFLPAFNETYYKDEVTNPVVLRAIKEYRKVLNALLKKYGKVHKINIELAREVGKNYSQRAKIEKEQNENYKAKKDAELECEKLGLKINSKNILKLRLFKEQKEFCAYSGEKIKISDLQDEKMLEIDHIYPYSRSFDDSYMNKVLVFTKQNQEKLNKTPFEAFGNDSTKWQKIEVLAKNLPEKKQKRILDKNYKDKEQKDFKDRNLNDTRYIARLVLNYTKDYLDFLPLSDDENTKLNDTQKGLKVHVEAKSGMLTSALRHTWGFSAKDRNNHLHHAIDAVIIAYANNSIVKAFSDFKKEQESNSAELYAKKISELDYKNKRKFFEPFSGFRQKVLDKIDEIFVSKPERKKPSGALHEETFRKEEEFYQSYGGKEGVLKALELGKIRKVNGKIVKNGDMFRVDIFKHKKTNKFYAVPIYTMDFALKVLPNKAVARSKKGEIKDWILMDENYEFCFSLYKDSLILIQTKDMQEPEFVYYNAFTSSTVSLIVSKHDNKFETLSKNQKILFKNANEKEVIAKSIGIQNLKVFEKYIVSALGEVTKAEFRQREDFKK

SEQ ID NO: 123 - protein, 987 aa, Campylobacter jejuni
  source 1..987: note = subsp. jejuni 53161
MARILAFDIGISSIGWAFSENDELKDCGVRIFTKAENPKTGESLALPRRLARSARKRLARRKARLNHLKHLIANEFKLNYEDYQSFDEGLAKAYKGSLISPYELRFRALNELLSKQDFARVILHIAKRRGYDDIKNNGDEEKSEILKAIKQNEEKLVNYQSVGEYLYKEYFQKFKENSKEFINVRNKKESYERCIAQSFLKDELKLIFQKQREFGFSFSKKFEEEVLSVAFYKRALKDFSHLVGNCSFFTDEKRAPKNSPLAFMFVALTRIINLLNNLKNTEGILYTKDDLNTLLNEVLKNGTLTYKQTKKLLGLSDDYEFKGEKGTYFIEFKKYKEFIKALGEHNLSQDNLNEIAKDITLIKDEIKLKKALAKYDLNQNQIDSLSKLEFKDHLNISFKALKLITPLMLEGKKYDEAYNELNLKVAINEDKKDFLPAFNETYYKDEVTNPVVLRAIKEYRKVLNALLKKYGKVHKINIELAREVGKNHSQRAKIEKEQNENYKAKKDAELECEKLGLKINSKNILKLRLFKEQKEFCAYSGEKIKISDLQDEKMLEIDHIYPYSRSFDDSYMNKVLVFTKQNQEKLNQTPFEAFGNDSAKWQKIEVLAKNLPTKKQKRILDKNYKDKEQKDFKDRNLNDTRYIARLVLNYTKDYLDFLPLSDDENTKLNDTQKGSKVHVEAKSGMLTSALRHTWGFSAKDRNNHLHHAIDAVIIAYANNSIVKAFSDFKKEQESNSAELYAKKISELDYKNKRKFFEPFSGFRQKVLDKIDEIFVSKPERKKPSGALHEETFRKEEEFYQSYGGKEGVLKALELGKIRKVNGKIVKNGDMFRVDIFKHKKTNKFYAVPIYTMDFALKVLPNKAVVQGKDKKSGLIKDWILMDENYEFCFSLYKDSLILIQTKDMQEPELVYFNAFTSSTVSLIVSKHDNKFETLSKNQKILFKNANEKEVIAKSIGIQNLKVFEKYIVSALGEVTKAEFRQREDFKK

SEQ ID NO: 124 - protein, 984 aa, Campylobacter jejuni
  source 1..984: note = subsp. jejuni 60004
MARILAFDIGISSIGWAFSENDELKDCGVRIFTKAENPKTGESLALPRRLARSARKRLARRKARLNHLKHLIANEFKLNYEDYQSFDESLAKAYKGSLISPYELRFRALNELLSKQDFARVILHIAKRRGYDDIKNNGDEEKGKILKAIKQNEEKLVNYQSVGEYLYKEYFQKFKENSKEFINVRNKKESYERCITQSFLKYELKLIFQKQREFGFSFSKKFEEEVLSVAFYKRALKDFSHLVGNCSFFTDEKRAPKNSPLAFMFVALTRIINILNNLKNTEGILYTKDDLNALLNEVLKNGTLTYKQTKKLLGLSDDYEFKGEKGTYFIEFKKYKEFIKALGEHNLSQDDLNEIAKDITLIKDEIKLKKALAKYDLNQNQIDSLSKLEFKDHLNISFKALKLITPLMLEGKKYDEACNELNLKVAINEDKKDFLPAFNETYYKDEVTNPVVLRAIKEYRKILNALLKKYGKVHKINIELAREVGKNHSQRAKIEKEQNENYKAKKDAEIECEKLGLKINSKNILKLRLFKEQKEFCAYSGEKIKISDLQDEKMLEIDHIYPYSRSFDDSYMNKVLVFTKQNQEKLNQTPFEAFGNDSAKWQKIEVLAKNLPTKKQKRILDKNYKDKEQKDFKDRNLNDTRYIARLVLNYTKDYLDFLPLSDDENTKLNDTQKGSKVHVEAKSGMLTSALRHTWGFSAKDRNNHLHHAIDAVIIAYANNSIVKAFSDFKKEQESNSAELYAKKISELDYKNKRKFFEPFSGFRQKVLDKIDEIFVSKPERKKPSGALHEETFRKEEEFYQSYGGKEGVLKALELGKIRKVNGKIVKNGDMFRVDIFKHKKTNKFYAVPIYTMDFALKVLPNKAVARSKKGEIKDWILMDENYEFCFSLYKDSLILIQTKDMQEPEFVYYNAFTSSTVSLIVSKHDNKFETLSKNQKILFKNANEKEVIAKSIGIQNLKVFEKYIVSALGEVTKAEFRQREDFKK

SEQ ID NO: 125 - protein, 984 aa, Campylobacter jejuni
MARILAFDIGISSIGWAFSENDELKDCGVRIFTKAENPKTGESLALPRRLARSARKRLARRKARLNHLKHLIANEFKLNYEDYQSFDESLAKAYKGSLISPYELRFRALNELLSKQDFARVILHIAKRRGYDDIKNNGDEEKSEILKAIKQNEEKLVNYQSVGEYLYKEYFQKFKENSKEFINVRNKKESYERCITQSFLKDELKLIFQKQREFGFSFSKKFEEEVLSVAFYKRALKDFSHLVGNCSFFTDEKRAPKNSPLAFMFVALTRIINILNNLKNTEGILYTKDDLNALLNEVLKNGTLTYKQTKKLLGLSDDYEFKGEKGTYFIEFKKYKEFIKALGEHNLSQDDLNEIAKDITLIKDEIKLKKALAKYDLNQNQIDSLSKLEFKDHLNISFKALKLITPLMLEGKKYDEACNELNLKVAINEDKKDFLPAFNETYYKDEVTNPVVLRAIKEYRKILNALLKKYGKVHKINIELAREVGKNHSQRAKIEKEQNENYKAKKDAEIECEKLGLKINSKNILKLRLFKEQKEFCAYSGEKIKLSDLQDEKMLEIDHIYPYSRSFDDSYMNKVLVFTKQNQEKLNKTPFEAFGNDSTKWQKIEVLAKNLPEKKQKRILDKNYKDKEQKDFKDRNLNDTRYIARLVLNYTKDYLDFLPLSDDENTKLNDTQKGSKVHVEAKSGMLTSALRHTWGFSAKDRNNHLHHAIDAAIIAYANNSIVKAFSDFKKEQESNSVELYAKKISELDYKNKRKFFEPFSGFRQKVLDKIDEIFVSKPERKKPSGALHEETFRKEEEFYQSYGGKEGVLKALELGKIRKVNGKIVKNGDMFRVDIFKHKKTNKFYAVPIYTMDFALKVLPNKAVARSKKGEIKDWILMDENYEFCFSLYKDSLILIQTKDMQEPELVYFNAFTSSTVSLIVSKHDNKFETLSKNQKILFKNANEKEVIAKSIGIQNLKVFEKYIVSALGEVTKAEFRQREDFKK

SEQ ID NO: 126 - protein, 984 aa, Campylobacter jejuni
  source 1..984: note = subsp. jejuni 84-25
MVRILAFDIGISSIGWAFSENDELKDCGVRIFTKVENPKTGESLALPRRLARSARKRLARRKARLNHLKHLIANEFKLNYEDYQSFDESLAKAYKGSLISPYELRFRALNELLSKQDFARVILHIAKRRGYDDIKNSDDKEKGAILKAIKQNEEKLANYQSVGEYLYKEYFQKFKENSKEFTNVRNKKESYERCIAQSFLKDELKLIFKKQREFGFSFSKKFEEEVLSVAFYKRALKDFSHLVGNCSFFTDEKRAPKNSPLAFMFVALTRIINLLNNLKNTEGILYTKDDLNALLNEVLKNGTLTYKQTKKLLGLSDDYEFKGEKGTYFIEFKKYKEFIKALGEHNLSQDDLNEIAKDITLIKDEIKLKKALAKYDLNQNQIDSLSKLEFKDHLNISFKALKLITPLMLEGKKYDEACNELNLKVAINEDKKDFLPAFNETYYKDEVTNPVVLRAIKEYRKVLNALLKKYGKVHKINIELAREVGKNHSQRAKIEKEQNENYKAKKDAELECEKLGLKINSKNILKLRLFKEQKEFCAYSGEKIKISDLQDEKMLEIDHIYPYSRSFDDSYMNKVLVFTKQNQEKLNKTPFEAFGNDSAKWQKIEVLAKNLPTKKQKRILDKNYKDKEQKDFKDRNLNDTRYIARLVLNYTKDYLDFLPLSDDENTKLNDTQKGSKVHVEAKSGMLTSALRHTWGFSTKDRNNHLHHAIDAVIIAYANNSIVKAFSDFKKEQESNSAELYAKKISELDYKNKRKFFEPFSGFRQKVLDKIDEIFVSKPERKKPSGALHEETFRKEEEFYQSYGGKEGVLKALELGKIRKVNGKIVKNGDMFRVDIFKHKKTNKFYAVPIYTMDFALKVLPNKAVARSKKGEIKDWILMDENYEFCFSLYKDSLILIQTKDMQEPEFVYYNAFTSSTVSLIVSKHDNKFETLSKNQKILFKNANEKEVIAKSIGIQNLKVFEKYIVSALGEVTKAEFRQREDFKK

SEQ ID NO: 127 - protein, 984 aa, Campylobacter jejuni
  source 1..984: note = subsp. jejuni 87459
MARILAFDIGISSIGWAFSENDELKDCGVRIFTKAENPKTGESLALPRRLARSARKRLARRKARLNHLKHLIANEFKLNYEDYQSFDESLAKAYKGSLISPYELRFRALNELLSKQDFARVILHIAKRRGYDDIKNSDDKEKGAILKAIKQNEEKLANYQSVGEYLYKEYFQKFKENSKEFTNVRNKKESYERCIAQSFLKDELKLIFKKQREFGFSFSKKFEEEVLSVAFYKRALKDFSHLVGNCSFFTDEKRAPKNSPLAFMFVALTRIINLLNNLKNTEGILYTKDDLNTFLNEVLKNGTLTYKQTKKLLGLSDDYEFKGEKGTYFIEFKKYKEFIKALGDHNLSQDDLNEIAKDITLIKDEIKLKKALAKYDLNQNQIDSLSKLEFKDHLNISFKALKLITPLMLEGKKYDEACNELNLKVAINEDKKDFLPAFNETYYKDEVTNPVVLRAIKEYRKVLNALLKKYGKVHKINIELAREVGKNHSQRAKIEKEQNENYKAKKDAELECEKLGLKINSKNILKLRLFKEQKEFCAYSGEKIKISDLQDEKMLEIDHIYPYSRSFDDSYMNKVLVFTKQNQEKLNKTPFEAFGNDSAKWQKIEVLAKNLPTKKQKRILDKNYKDKEQKDFKDRNLNDTRYIARLVLNYTKDYLDFLPLSDDENTKLNDTQKGSKVHVEAKSGMLTSALRHTWGFSTKDRNNHLHHAIDAVIIAYANNSIVKAFSDFKKEQESNSAELYAKKISELDYKNKRKFFEPFSGFRQKVLDKIDEIFVSKPERKKPSGALHEETFRKEEEFYQSYGGKEGVLKALELGKIRKVNGKIVKNGDMFRVDIFKHKKTNKFYAVPIYTMDFALKVLPNKAVARSKKGEIKDWILMDENYEFCFSLYKDSLILIQTKDMQEPEFVYYNAFTSSTVSLIVSKHDNKFETLSKNQKILFKNANEKEVIAKSIGIQNLKVFEKYIVSALGEVTKAEFRQREDFKK

SEQ ID NO: 128 - protein, 984 aa, Campylobacter jejuni
  source 1..984: note = subsp. jejuni ATCC 33560
MARILAFDIGISSIGWAFSENDELKDCGVRIFTKAENPKTGESLALPRRLARSARKRLARRKARLNHLKHLIANEFKLNYEDYQSFDESLAKAYKGSLISPYELRFRALNELLSKQDFARVILHIAKRRGYDDIKNSDDKEKGAILKAIKQNEEKLANYQSVGEYLYKEYFQKFKENSKEFTNVRNKKESYERCIAQSFLKDELKLIFKKQREFGFSFSKKFEEEVLSVAFYKRALKDFSHLVGNCSFFTDEKRAPKNSPLAFMFVALTRIINLLNNLKNTEGILYTKDDLNALLNEVLKNGTLTYKQTKKLLGLSDDYEFKGEKGTYFIEFKKYKEFIKALGDHSLSQDDLNEIAKDITLIKDEIKLKKALAKYDLNQNQIDSLSKLEFKDHLNISFKALKLITPLMLEGKKYDEACNELNLKVAINEDKKDFLPAFNETYYKDEVTNPVVLRAIKEYRKVLNALLKKYGKVHKINIELAREVGKNYSQRAKIEKEQNENYKAKKDAELECEKLGLKINSKNILKLRLFKEQKEFCAYSGEKIKISDLQDEKMLEIDHIYPYSRSFDDSYMNKVLVFTKQNQEKLNQTPFEAFGNDSAKWQKIEVLAKNLPTKKQKRILDKNYKDKEQKNFKDRNLNDTRYIARLVLNYTKDYLDFLPLSDDENTKLNDTQKGSKVHVEAKSGMLTSALRHTWGFSAKDRNNHLHHTIDAVIIAYANNSIVKAFSDFKKEQESNSAELYAKKISELDYKNKRKFFEPFSGFRQKVLDKIDEIFVSKPERKKPSGALHEETFRKEEEFYQSYGGKEGVLKALELGKIRKVNGKIVKNGDMFRVDIFKHKKTNKFYAVPIYTMDFALKVLPNKAVARSKKGEIKDWILMDENYEFCFSLYKDSLILIQTKDMQEPEFVYYNAFTSSTVSLIVSKHDNKFETLSKNQKILFKNANEKEVIAKSIGIQNLKVFEKYIVSALGEVTKAEFRQREDFKK

SEQ ID NO: 129 - protein, 987 aa, Campylobacter jejuni
  source 1..987: note = subsp. jejuni CF93-6
MARILAFDIGISSIGWAFSENDELKDCGVRIFTKVENPKTGESLALPRRLARSARKRLARRKARLNHLKHLIANEFKLNYEDYQSFDESLAKAYKGSLISPYELRFRALNELLSKQDFARVILHIAKRRGYDDIKNSDDKEKGAILKAIKQNEEKLANYQSVGEYLYKEYFQKFKENSKEFTNVRNKKESYERCIAQSFLKDELKLIFKKQREFGFSFSKKFEEEVLSVAFYKRALKDFSHLVGNCSFFTDEKRVPKNSPLAFMFVALTRIINLLNNLKNTEGILYTKDDLNALLNEVLKNGTLTYKQTKKLLGLSDDYEFKGEKGTYFIEFKKYKEFIKALGEHNLSQDDLNEIAKDITLIKDEIKLKKALAKYDLNQNQIDSLSKLEFKDHLNISFKALKLITPLMLEGKKYDEACNELNLKVAINEDKKDFLPAFNETYYKDEVTNPVVLRAIKEYRKVLNALLKKYGKVHKINIELAREVGKNHSQRAKIEKEQNENYKAKKDAELECEKLGLKINSKNILKLRLFKEQKEFCAYSGEKIKISDLQDEKMLEIDHIYPYSRSFDDSYMNKVLVFTKQNQEKLNQTPFEAFGNDSAKWQKIEVLAKNLPTKKQKRILDKNYKDKEQKNFKDRNLNDTRYIARLVLNYTKDYLDFLPLSDDENTKLNDTQKGSKVHVEAKSGMLTSALRHTWGFSAKDRNNHLHHAIDAVIIAYANNSIVKAFSDFKKEQESNSAELYAKKISELDYKNKRKFFEPFSGFRQKVLDKIDEIFVSKPERKKPSGALHEETFRKEEEFYQSYGGKEGVLKALELGKIRKVNGKIVKNGDMFRVDIFKHKKTNKFYGVPIYTMDFALKVLPNKAVARSKKGEIKDWILMDENYEFCFSLYKDSLILIQTKDMQEPEFVYYNAFTSSTVSLIVSKHDNKFETLSKNQKILFKNANEKEVIAKSIGIQNLKVFEKYIVSALGEVTKAEFRQREDFKNELR

SEQ ID NO: 130 - protein, 984 aa, Campylobacter jejuni
  source 1..984: note = subsp. jejuni CG8486
MARILAFDIGISSIGWAFSENDELKDCGVRIFTKAENPKTGESLALPRRLARSARKRLARRKARLNHLKHLIANEFKLNYEDYQSFDESLAKAYKGSLISPYELRFRALNELLSKQDFARVILHIAKRRGYDDIKNSDDKEKGAILKAIKQNEEKLANYQSVGEYLYKEYFQKFKENSKEFTNVRNKKESYERCIAQSFLKDELKLIFKKQREFGFSFSKKFEEEVLSVAFYKRALKDFSHLVGNCSFFTDEKRAPKNSPLAFMFVALTRIINLLNNLKNTEGILYTKDDLNALLNEVLKNGTLTYKQTKKLLGLSDDYEFKGEKGTYFIEFKKYKEFIKALGDHSLSQDDLNEIAKDITLIKDEIKLKKALAKYDLNQNQIDSLSKLEFKDHLNISFKALKLITPLMLEGKKYDEACNELNLKVAINEDKKDFLPAFNETYYKDEVTNPVVLRAIKEYRKVLNALLKKYGKVHKINIELAREVGKNYSQRAKIEKEQNENYKAKKDAELECEKLGLKINSKNILKLRLFKEQKEFCAYSGEKIKISDLQDEKMLEIDHIYPYSRSFDDSYMNKVLVFTKQNQEKLNQTPFEAFGNDSAKWQKIEVLAKNLPTKKQKRILDKNYKDKEQKDFKDRNLNDTRYIARLVLNYTKDYLDFLPLSDDENTKLNDTQKGSKVHVEAKSGMLTSALRHTWGFSAKDRNNHLHHAIDAVIIAYANNSIVKAFSDFKKEQESNSAELYAKKISELDYKNKRKFFEPFSGFRQKVLDKIDEIFVSKPERKKPSGALHEETFRKEEEFYQSYGGKEGVLKALELGKIRKVNGKIVKNGDMFRVDIFKHKKTNKFYAVPIYTMDFALKVLPNKAVARSKKGEIKDWILMDENYEFCFSLYKDSLILIQTKDMQEPEFVYYNAFTSSTVSLIVSKHDNKFETLSKNQKILFKNANEKEVIAKSIGIQNLKVFEKYIVSALGEVTKAEFRQREDFKK

SEQ ID NO: 131 - protein, 984 aa, Campylobacter jejuni
  source 1..984: note = subsp. jejuni HB93-13
MARILAFDIGISSIGWAFSENDELKDCGVRIFTKVENPKTGESLALPRRLARSARKRLARRKARLNHLKHLIANEFKLNYEDYQSFDESLAKAYKGSLISPYELRFRALNELLSKQDFARVILHIAKRRGYDDIKNSDDKEKGAILKAIKQNEEKLANYQSVGEYLYKEYFQKFKENSKEFTNVRNKKESYERCIAQSFLKDELKLIFKKQREFGFSFLKKFEEEVLSVAFYKRALKDFSHLVGNCSFFTDEKRAPKNSPLAFMFVALTRIINLLNNLKNTEGILYTKDDLNALLNEVLKNGTLTYKQTKKLLGLSDDYEFKGEKGTYFIEFKKYKEFIKALGEHNLSQDDLNEIAKDITLIKDEIKLKKALAKYDLNQNQIDSLSKLEFKDHLNISFKALKLITPLMLEGKKYDEAYNELNLKVAINEDKKDFLPAFNETYYKDEVTNPVVLRAIKEYRKVLNALLKKYGKVHKINIELAREVGKNHSQRAKIEKEQNENYKAKKDAELECEKLGLKINSKNILKLRLFKEQKEFCAYSGEKIKISDLQDEKMLEIDHIYPYSRSFDDSYMNKVLVFTKQNQEKLNQTPFEAFGNDSAKWQKIEVLAKNLPTKKQKRILDKNYKDKEQKDFKDRNLNDTRYIARLVLNYTKDYLDFLPLSDDENTKLNDTQKGSKVHVEAKSGMLTSALRHTWGFSAKDRNNHLHHAIDAVIIAYANNSIVKAFSDFKKEQESNSAELYAKKISELDYKNKRKFFEPFSGFRQKVLDKIDEIFVSKPERKKPSGALHEETFRKEEEFYQSYGGKEGVLKALELGKIRKVNGKIVKNGDMFRVDIFKHKKTNKFYAVPIYTMDFALKVLPNKAVARSKKGEIKDWILMDENYEFCFSLYKDSLILIQTKDMQEPELVYFNAFTSSTVSLIVSKHDNKFETLSKNQKILFKNANEKEVIAKSIGIQNLKVFEKYIVSALGEVTKAEFRQREDFKK

SEQ ID NO: 132 - protein, 987 aa, Campylobacter jejuni
  source 1..987: note = subsp. jejuni LMG 23210
MARILAFDIGISSIGWAFSENDELKDCGVRIFTKAENPKTGESLALPRRLARSARKRLARRKARLNHLKHLIANEFKLNYEDYQSFDESLAKAYKGSLISPYELRFRALNELLSKQDFARVILHIAKRRGYDDIKNSDDKEKGAILKAIKQNEEKLANYQSVGEYLYKEYFQKFKENSKEFTNVRNKKESYERCIAQSFLKDELKLIFKKQREFGFSFSKKFEEEVLSVAFYKRALKDFSHLVGNCSFFTDEKRAPKNSPLAFMFVALTRIINLLNNLKNTEGILYTKDDLNALLNEVLKNGTLTYKQTKKLLGLSDDYEFKGEKGTYFIEFKKYKEFIKALGDHSLSQDDLNEIAKDITLIKDEIKLKKALVKYDLNQNQIDSLSKLEFKDHLNISFKALKLITPLMLEGKKYDEACNELNLKVAINEDKKDFLPAFNETYYKDEVTNPVVLRAIKEYRKVLNALLKKYGKVHKINIELAREVGKNYSQRAKIEKEQNENYKAKKDAELECEKLGLKINSKNILKLRLFKEQKEFCAYSGEKIKISDLQDEKMLEIDHIYPYSRSFDDSYMNKVLVFTKQNQEKLNQTPFEAFGNDSAKWQKIEVLAKNLPTKKQKRILDKNYKDKEQKDFKDRNLNDTRYIARLVLNYTKDYLDFLPLSDDENTKLNDTQKGSKVHVEAKSGMLTSALRHTWGFSAKDRNNHLHHAIDAVIIAYANNSIVKAFSDFKKEQESNSAELYAKKISELDYKNKRKFFEPFSGFRQKVLDKIDEIFVSKPERKKPSGALHEETFRKEEEFYQSYGGKEGVLKALELGKIRKVNGKIVKNGDMFRVDIFKHKKTNKFYAVPIYTMDFALKVLPNKAVARSKKGEIKDWILMDENYEFCFSLYKDSLILIQTKDMQEPELVYFNAFTSSTVSLIVSKHDNKFETLSKNQKILFKNANEKEVIAKSIGIQNLKVFEKYIVSALGEVTKAEFRQREDFKNELR

SEQ ID NO: 133 - protein, 984 aa, Campylobacter jejuni
  source 1..984: note = subsp. jejuni LMG 23211
MARILAFDIGISSIGWAFSENDELKDCGVRIFTKAENPKTGESLALPRRLARSARKRLARRKARLNHLKHLIANEFKLNYEDYQSFDESLAKAYKGSLISPYELRFRALNELLSKQDFARVILHIAKRRGYDDIKNNGDEEKSEILKAIKQNEEKLVNYQSVGEYLYKEYFQKFKENSKEFINVRNKKESYERCITQSFLKDELKLIFQKQREFGFSFSKKFEEEVLSVAFYKRALKDFSHLVGNCSFFTDEKRAPKNSPLAFMFVALTRIINLLNNLKNTEGILYTKDDLNALLNEVLKNGTLTYKQTKKLLGLSDDYEFKGEKGTYFIEFKKYKEFIKALDEHSLSQDDLNEIAKDITLIKDEIKLKKALAKYDLNQNQIDSLSKLEFKDHLNISFKALKLITPLMLEGKKYDEACNELNLKVAINEDKKDFLPAFNETYYKDEVTNPVVLRAIKEYRKILNALLKKYGKVHKINIELAREVGKNHSQRAKIEKEQNENYKAKKDAEIECEKLGLKINSKNILKLRLFKEQKEFCAYSGEKIKISDLQDEKMLEIDHIYPYSRSFDDSYMNKVLVFTKQNQEKLNKTPFEAFGNDGVKWQKIEVLAKNLPEKKQKRILDKNYKDKEQKDFKDRNLNDTRYIARLVLNYTKDYLDFLPLSDDENTKLNDTQKGSKVHVEAKSGMLTSALRHTWGFSTKDRNNHLHHAIDAAIIAYANNSIVKAFSDFKKEQESNSAELYAKKISELDYKNKRKFFEPFSGFRQKVLDKIDEIFVSKPERKKPSGALHEETFRKEEEFYQSYGGKEGVLKALELGKIRKVNGKIVKNGDMFRVDIFKHKKTNKFYAVPIYTMDFALKVLPNKAVARSKKGEIKDWILMDENYEFCFSLYKDSLILIQTKDMQEPELVYFNAFTSSTVSLVVSKHDNKFETLSKNQKILFKNANEKEVIAKSIGIQNLKVFEKYIVSALGEVTKAEFRQREDFKK

SEQ ID NO: 134 - protein, 984 aa, Campylobacter jejuni
  source 1..984: note = subsp. jejuni LMG 23263
MARILAFDIGISSIGWAFSENDELKDCGVRIFTKAENPKTGESLALPRRLARSARKRLARRKARLNHLKHLIANEFKLNYEDYQSFDESLAKAYKGSLISPYELRFRALNELLSKQDFARVILHIVKRRGYDDIKNSDDKEKGAILKAIKQNEEKLANYQSVGEYLYKEYFQKFKENSKEFTNVRNKKESYERCIAQSFLKDELKLIFKKQREFGFSFSKKFEEEVLSVAFYKRALKDFSHLVGNCSFFTDEKRAPKNSPLAFMFVALTRIINLLNNLKNTEGILYTKDDLNTLLNEVLKNGTLTYKQTKKLLGLSDDYEFKGEKGTYFIEFKKYKEFIKALGDHSLSQDDLNEIAKDITLIKDEIKLKKALAKYDLNQNQIDSLSKLEFKDHLNISFKALKLITPLMLEGKKYDEACNELNLKVAINEDKKDFLPAFNETYYKDEVTNPVVLRAIKEYRKVLNALLKKYGKVHKINIELAREVGKNHSQRAKIEKEQNENYKAKKDAEFECEKLGLKINSKNILKLRLFKEQKEFCAYSGEKIKISDLQDEKMLEIDHIYPYSRSFDDSYMNKVLVFTKQNQEKLNKTPFEAFGNDSAKWQKIEVLAKNLPTKKQKRILDKNYKDKEQKDFKDRNLNDTRYIARLVLNYTKDYLDFLPLSDDENTKLNDTQKGSKVHVEAKSGMLTSALRHTWGFSTKDRNNHLHHAIDAVIIAYANNSIVKAFSDFKKEQESNSAELYAKKISELDYKNKRKFFEPFSGFRQKVLDKIDEIFVSKPERKKPSGALHEETFRKEEEFYQSYGGKEGVLKALELGKIRKVNGKIVKNGDMFRVDIFKHKKTNKFYAVPIYTMDFALKVLPNKAVARSKKGEIKDWILMDENYEFCFSLYKDSLILIQTKDMQEPEFVYYNAFTSSTVSLIVSKHDNKFETLSKNQKILFKNANEKEVIAKSIGIQNLKVFEKYIVSALGEVTKAEFRQREDFKK

SEQ ID NO: 135 - protein, 984 aa, Campylobacter jejuni
  source 1..984: note = subsp. jejuni LMG 23264
MARILAFDIGISSIGWAFSENDELKDCGVRIFTKVENPKTGESLALPRRLARSARKRLARRKARLNHLKHLIANEFKLNYEDYQSFDESLAKAYKGSLISPYELRFRALNELLSKQDFARVILHIAKRRGYDDIKNSDDKEKGAILKAIKQNEEKLANYQSVGEYLYKEYFQKFKENSKEFTNVRNKKESYERCIAQSFLKDELKLIFKKQREFGFSFSKKFEEEVLSVAFYKRALKDFSHLVGNCSFFTDEKRAPKNSPLAFMFVALTRIINLLNNLKNTEGILYTKDDLNALLNEVLKNGTLTYKQTKKLLGLSDDYEFKGEKGTYFIEFKKYKEFIKALGEHNLSQDDLNEIAKDITLIKDEIKLKKALAKYDLNQNQIDSLSKLEFKDHLNISFKALKLITPLMLEGKKYDEACNELNLKVAINEDKKDFLPAFNETYYKDEVTNPVVLRAIKEYRKVLNALLKKYGKVHKINIELAREVGKNHSQRAKIEKEQNENYKAKKDAELECEKLGLKINSKNILKLRLFKEQKEFCAYSGEKIKISDLQDEKMLEIDHIYPYSRSFDDSYMNKVLVFTKQNQEKLNKTPFEAFGNDSAKWQKIEVLAKNLPTKKQKRILDKNYKDKEQKDFKDRNLNDTRYIARLVLNYTKDYLDFLPLSNDENTKLNDTQKGSKVHVEAKSGMLTSALRHTWGFSTKDRNNHLHHAIDAVIIAYANNSIVKAFSDFKKEQESNSAELYAKKISELDYKNKRKFFEPFSGFRQKVLDKIDEIFVSKPERKKPSGALHEETFRKEEEFYQSYGGKEGVLKALELGKIRKVNGKIVKNGDMFRVDIFKHKKTNKFYAVPIYTMDFALKVLPNKAVARSKKGEIKDWILMDENYEFCFSLYKDSLILIQTKDMQEPEFVYYNAFTSSTVSLIVSKHDNKFETLSKNQKILFKNANEKEVIAKSIGIQNLKVFEKYIVSALGEVTKAEFRQREDFKK

SEQ ID NO: 136 - protein, 987 aa, Campylobacter jejuni
  source 1..987: note = subsp. jejuni LMG 23269
MARILAFDIGISSIGWAFSENDELKDCGVRIFTKAENPKTGESLALPRRLARSARKRLARRKARLNHLKHLIANEFKLNYEDYQSFDESLAKAYKGSLISPYELRFRALNELLSKQDFARVILHIAKRRGYDDIKNNGDEEKSEILKAIKQNEEKLVNYQSVGEYLYKEYFQKFKENSKEFINVRNKKESYERCIAQSFLKDELKLIFQKQREFGFSFSKKFEEEVLSVAFYKRALKDFSHLVGNCSFFTDEKRAPKNSPLAFMFVALTRIINLLNNLKNTEGILYTKDDLNTLLNEVLKNGTLTYKQTKKLLGLSDDYEFKGEKGTYFIEFKKYKEFIKALGEHNLSQDNLNEIAKDITLIKDEIKLKKALAKYDLNQNQIDSLSKLEFKDHLNISFKALKLITPLMLEGKKYDEAYNELNLKVAINEDKKDFLPAFNETYYKDEVTNPVVLRAIKEYRKVLNALLKKYGKVHKINIELAREVGKNHSQRAKIEKEQNENYKAKKDAELECEKLGLKINSKNILKLRLFKEQKEFCAYSGEKIKISDLQDEKMLEIDHIYPYSRSFDDSYMNKVLVFTKQNQEKLNQTPFEAFGNDSAKWQKIEVLAKNLPTKKQKRILDKNYKDKEQKDFKDRNLNDTRYIARLVLNYTKDYLDFLPLSDDENTKLNDTQKGSKVHVEAKSGMLTSALRHTWGFSAKDRNNHLHHAIDAVIIAYANNSIVKAFSDFKKEQESNSAELYAKKISELDYKNKRKFFEPFSGFRQKVLDKIDEIFVSKPERKKPSGALHEETFRKEEEFHQSYGGKEGVLKALELGKIRKVNGKIVKNGDMFRVDIFKHKKTNKFYAVPIYTMDFALKVLPNKAVVQGKDKKSGLIKDWILMDENYEFCFSLYKDSLILIQTKDMQEPELVYFNAFTSSTVSLIVSKHDNKFETLSKNQKILFKNANEKEVIAKSIGIQNLKVFEKYIVSALGEVTKAEFRQREDFKK

SEQ ID NO: 137 - protein, 987 aa, Campylobacter jejuni
  source 1..987: note = subsp. jejuni LMG 23357
MARILAFDIGISSIGWAFSENDELKDCGVRIFTKAENPKTGESLALPRCLARSARKRLARRKARLNHLKHLIANEFKLNYEDYQSFDESLAKAYKGSLISPYELRFRALNELLSKQDFARVILHIAKRRGYDDIKNNGDEEKGEILKAIKQNEEKLVSYQSVGEYLYKEYFQKFKENSKEFINVRNKKESYERCIAQSFLKDELKLIFQKQRKFGFSFSKKFEEEVLSVAFYKRALKDFSHLVGNCSFFTDEKRAPKNSPLAFMFVALTRIINLLNNLKNTEGILYTKDDLNTLLNEVLKNGTLTYKQTKKLLGLSNDYEFKGEKGTYFIEFQKYKEFVKALGEHNLSQDDLNEIAKDITLIKDEIKLKKALAKYDLNQNQIDSLSKLEFKDHLNISFKALKLITPLMLEGKKYDEACNELNLKVAINEDKKDFLPAFNETYYKDEVTNPVVLRAIKEYRKVLNALLKKYGKVHKINIELAREVGKNHSQRAKIEKEQNENYKAKKDAELECEKLGLKINSKNILKLRLFKEQKEFCVYSGEKIKISDLQDEKMLEIDHIYPYSRSFDDSYMNKVLVFTKQNQEKLNKTPFETFGNDRVKWQKIEVLAKNLPTKKQKRILDKNYKDKEQKDFKDRNLNDTRYIARLVLNYTKDYLDFLPLSDDENTKLNDTQKGSKVHVEAKSGMLTSTLRHTWGFSTKDRNNHLHHAIDAAIIAYANNSIVKAFSDFKKEQESNTAELYAKKISELDYKNKRKFFEPFSGFRQKLLDKIDEIFVSKPERKKPSGALHEETFRKEEEFYQSYGGKEGVLKALELGKIRKVNGKIVSNGDMFRVDIFKHKKTNKFYAVPIYTMDFALKVLPNKAVVQGKDKKSGLIKDWILMDENYEFCFSLYKDSLILIQTKDMQEPELVYYERLDSSNASLTVSKHDNKFETLSKNQKILFKNANEKEVIAKSIGIQNLKVFEKYIVSALGEVTKAEFRQREDFKK

SEQ ID NO: 138 - protein, 984 aa, Campylobacter jejuni
  source 1..984: note = subsp. jejuni NCTC 11168 = ATCC 700819
MARILAFDIGISSIGWAFSENDELKDCGVRIFTKVENPKTGESLALPRRLARSARKRLARRKARLNHLKHLIANEFKLNYEDYQSFDESLAKAYKGSLISPYELRFRALNELLSKQDFARVILHIAKRRGYDDIKNSDDKEKGAILKAIKQNEEKLANYQSVGEYLYKEYFQKFKENSKEFTNVRNKKESYERCIAQSFLKDELKLIFKKQREFGFSFSKKFEEEVLSVAFYKRALKDFSHLVGNCSFFTDEKRAPKNSPLAFMFVALTRIINLLNNLKNTEGILYTKDDLNALLNEVLKNGTLTYKQTKKLLGLSDDYEFKGEKGTYFIEFKKYKEFIKALGEHNLSQDDLNEIAKDITLIKDEIKLKKALAKYDLNQNQIDSLSKLEFKDHLNISFKALKLVTPLMLEGKKYDEACNELNLKVAINEDKKDFLPAFNETYYKDEVTNPVVLRAIKEYRKVLNALLKKYGKVHKINIELAREVGKNHSQRAKIEKEQNENYKAKKDAELECEKLGLKINSKNILKLRLFKEQKEFCAYSGEKIKISDLQDEKMLEIDHIYPYSRSFDDSYMNKVLVFTKQNQEKLNQTPFEAFGNDSAKWQKIEVLAKNLPTKKQKRILDKNYKDKEQKNFKDRNLNDTRYIARLVLNYTKDYLDFLPLSDDENTKLNDTQKGSKVHVEAKSGMLTSALRHTWGFSAKDRNNHLHHAIDAVIIAYANNSIVKAFSDFKKEQESNSAELYAKKISELDYKNKRKFFEPFSGFRQKVLDKIDEIFVSKPERKKPSGALHEETFRKEEEFYQSYGGKEGVLKALELGKIRKVNGKIVKNGDMFRVDIFKHKKTNKFYAVPIYTMDFALKVLPNKAVARSKKGEIKDWILMDENYEFCFSLYKDSLILIQTKDMQEPEFVYYNAFTSSTVSLIVSKHDNKFETLSKNQKILFKNANEKEVIAKSIGIQNLKVFEKYIVSALGEVTKAEFRQREDFKK

SEQ ID NO: 139 - protein, 983 aa, Campylobacter jejuni
  source 1..983: note = subsp. jejuni NW
MARILAFDIGISSIGWAFSENDELKDCGVRIFTKAENPKTGESLALPRRLARSARKRLARRKARLNHLKHLIANEFKLNYEDYQSFDESLAKAYKGSLISPYELRFRALNELLSKQDFARVILHIAKRRGYDDIKNSDDKEKGAILKAIKQNEEKLANYQSVGEYLYKEYFQKFKENSKEFTNVRNKKESYERCIAQSFLKDELKLIFKKQREFGFSFSKKFEEEVLSVAFYKRALKDFSHLVGNCSFFTDEKRAPKNSPLAFMFVALTRIINLLNNLKNTEGILYTKDDLNALLNEVLKNGTLTYKQTKKLLGLSDDYEFKGEKGTYFIEFKKYKEFIKALGEHNLSQDDLNEIAKDITLIKDEIKLKKALAKYDLNQNQIDSLSKLEFKDHLNISFKALKLVTPLMLEGKKYDEACNELNLKVAINEDKKDFLPAFNETYYKDEVTNPVVLRAIKEYRKVLNALLKKYGKVHKINIELAREVGKNHSQRAKIEKEQNENYKAKKDAELECEKLGLKINSKNILKLRLFKEQKEFCAYSGEKIKISDLQDEKMLEIDHIYPYSRSFDDSYMNKVLVFTKQNQEKLNQTPFEAFGNDSAKWQKIEVLAKNLPTKKQKRILDKNYKDKEQKNFKDRNLNDTRYIARLVLNYTKDYLDFLPLSDDENTKLNDTQKGSKVHVEAKSGMLTSALRHTWGFSAKDRNNHLHHAIDAVIIAYANNSIVKAFSDFKKEQESNSAELYAKKISELDYKNKRKFFEPFSGFRQKVLDKIDEIFVSKPERKKPSGALHEETFRKEEFYQSYGGKEGVLKALELGKIRKVNGKIVKNGDMFRVDIFKHKKTNKFYAVPIYTMDFALKVLPNKAVARSKKGEIKDWILMDENYEFCFSLYKDSLILIQTKDMQEPEFVYYNAFTSSTVSLIVSKHDNKFETLSKNQKILFKNANEKEVIAKSIGIQNLKVFEKYIVSALGEVTKAEFRQREDFKK

SEQ ID NO: 140 - protein, 987 aa, Campylobacter jejuni
MARILAFDIGISSIGWAFSENDELKDCGVRIFTKAENPKTGESLALPRRLARSARKRLARRKARLNHLKHLIANEFKLNYEDYQSFDESLAKAYKGSLISPYELRFRALNELLSKQDFARVILHIAKRRGYDDIKNNGDEEKSEILKAIKQNEEKLVNYQSVGEYLYKEYFQKFKENSKEFINVRNKKESYERCIAQSFLKDELKLIFQKQREFGFSFSKKFEEEVLSVAFYKRALKDFSHLVGNCSFFTDEKRAPKNSPLAFMFVALTRIINLLNNLKNTEGILYTKDDLNTLLNEVLKNGTLTYKQTKKLLGLSDDYEFKGEKGTYFIEFKKYKEFIKALGEHNLSQDNLNEIAKDITLIKDEIKLKKALAKYDLNQNQIDSLSKLEFKDHLNISFKALKLITPLMLEGKKYDEAYNELNLKVAINEDKKDFLPAFNETYYKDEVTNPVVLRAIKEYRKVLNALLKKYGKVHKINIELAREVGKNHSQRAKIEKEQNENYKAKKDAELECEKLGLKINSKNILKLRLFKEQKEFCAYSGEKIKISDLQDEKMLEIDHIYPYSRSFDDSYMNKVLVFTKQNQEKLNQTPFEAFGNDSAKWQKIEVLAKNLPTKKQKRILDKNYKDKEQKDFKDRNLNDTRYIARLVLNYTKDYLDFLPLSDDENTKLNDTQKGSKVHVEAKSGMLTSALRHTWGFSAKDRNNHLHHAIDAVIIAYANNSIVKAFSDFKKEQESNSAELYAKKISELDYKNKRKFFEPFSGFRQKVLDKIDEIFVSKPERKKPSGALHEETFRKEEEFYQSYGGKEGVLKALELGKIRKVNGKIVKNGDMFRVDIFKHKKTNKFYPVPIYTMDFALKVLPNKAVVQGKDKKSGLIKDWILMDENYEFCFSLYKDSLILIQTKDMQEPELVYFNAFTSSTVSLIVSKHDNKFETLSKNQKILFKNANEKEVIAKSIGIQNLKVFEKYIVSALGEVTKAEFRQREDFKK

SEQ ID NO: 141 - protein, 1003 aa, Campylobacter lari
MRILGFDIGINSIGWAFVENDELKDCGVRIFTKAENPKNKESLALPRRNARSSRRRLKRRKARLIAIKRILAKELKLNYKDYVAADGELPKAYEGSLASVYELRYKALTQNLETKDLARVILHIAKHRGYMNKNEKKSNDAKKGKILSALKNNALKLENYQSVGEYFYKEFFQKYKKNTKNFIKIRNTKDNYNNCVLSSDLEKELKLILEKQKEFGYNYSEDFINEILKVAFFQRPLKDFSHLVGACTFFEEEKRACKNSYSAWEFVALTKIINEIKSLEKISGEIVPTQTINEVLNLILDKGSITYKKFRSCINLHESISFKSLKYDKENAENAKLIDFRKLVEFKKALGVHSLSRQELDQISTHITLIKDNVKLKTVLEKYNLSNEQINNLLEIEFNDYINLSFKALGMILPLMREGKRYDEACEIANLKPKTVDEKKDFLPAFCDSIFAHELSNPVVNRAISEYRKVLNALLKKYGKVHKIHLELARDVGLSKKAREKIEKEQKENQAVNAWALKECENIGLKASAKNILKLKLWKEQKEICIYSGNKISIEHLKDEKALEVDHIYPYSRSFDDSFINKVLVFTKENQEKLNKTPFEAFGKNIEKWSKIQTLAQNLPYKKKNKILDENFKDKQQEDFISRNLNDTRYIATLIAKYTKEYLNFLLLSENENANLKSGEKGSKIHVQTISGMLTSVLRHTWGFDKKDRNNHLHHALDAIIVAYSTNSIIKAFSDFRKNQELLKARFYAKELTSDNYKHQVKFFEPFKSFREKILSKIDEIFVSKPPRKRARRALHKDTFHSENKIIDKCSYNSKEGLQIALSCGRVRKIGTKYVENDTIVRVDIFKKQNKFYAIPIYAMDFALGILPNKIVITGKDKNNNPKQWQTIDESYEFCFSLYKNDLILLQKKNMQEPEFAYYNDFSISTSSICVEKHDNKFENLTSNQKLLFSNAKEGSVKVESLGIQNLKVFEKYIITPLGDKIKADFQPRENISLKTSKKYGLR

SEQ ID NO: 142 - protein, 1430 aa, Capnocytophaga canimorsus
MKHILGLDLGTNSIGWAVVKEAQNDNEQSEIVDVGVRVNPLTTDEKTNFEKGKPISTNADRTLKRSARRNLQRYKLRRKELIELLKEHQLISTDTILTENGKGTTFQTLELRAKSAKEKISLEELARVFLTINKKRGYKSSRKAKNEDEGQLIDGMEIAKRLYEENLTTGQLSLQLLKEGKKSLPDYYRSDLQFELDKVWNFQKQFHSHILTDEFYAQLKGKGQRATSALFLAKYQIYTAENKGSREDKKLQAYQWRVDALSKELTREQLAFVITEINNNLNNSSGYLGAISDRSKELYFNNETVGEYLWKQIAANPHTSLKNQVFYRQDYLDEFEQIWKTQSAFYPEILTDELKKELRDVVIFYQRKLKSQKSLVSFCEFENKEIEIKKEDGTSTKKVIGLKVAPKSSPLFQEFKIWQNLNNVLIRKKGSKTKKVDKNQQAVLFEEEKTIFELDLEAKQALFNELNLKGNLKAYYCLEILGYSPKEWEMNYSVLEGNRTNKALYEAYLKITDLEGYDAKNHLKVKLNKDEVELDDLKVPASEIKDMVQAIFKEAGINTDILHFNAELDGKDFENQASYQLWHLLYSYEGDDSKSGNELLYKLLETKFGFKKEYAQILANVSLSDDYGSLSTKAMRKIHPYIKENKFSTACELAGYRHSKHSLTKEENDNRVLKDSLEVLKKNSLRQPVVEKILNQMINLVNALLKKYRTENPNFKFDEIRIELARELKKNAEERANMTVNINKAKTEHEKIIKILKNEFGLPNPTRNDIIRYRLYEELKANGYKDLYTNEYIEKQDLFTKNIDIEHIIPKSRVFDDSFSNKTLSFRKTNLDKGERTAFDYIESKFGADKLEEYVARVEDLYKNNIISKAKYQKLLKKESEIGDGFVERDLRETQYIAKKAKEILLQITPNVLSTSGGITDRLREDWDLINVMKELNLPKYRALGLTQMEDRKYGQQVEVIIDWTKRNDHRHHAMDALTVAFTKHNHIQYLNYLNARKNEKHREHSNIMGIQQLETIKVTDKNGNEKRVFKAPMPNFRQVTKAFLENVLISHKAKNKVVTKNKNKVAGSNKVQEVLTPRGQLHKETVYGKYQYYVQKEEKIGGKFDLETIKKVANPLYQSLLKKRLEENGGDPKKAFTGKNSLAKNPIYLDDAQTEQLPEKVKLVWLENSFSIRKDITPENFKDEKLIDKILDEGVKRILKERLQSFGNDAKKAFSDLDKNPIWLNKEKGIAIKRVAISGVANAEPLHTKKDHLGKEILDKEGKSIPVDFISTGNNHHVAVYRDEKGNLQEKVVSVFEAVVRANQGLPIIDKTYNQHLGWEFLFTMKQNEMFVFSNESTGFNPNDIDLLDPKNKKIISPNLFRVQKFSKLQYGNSFVREFVFRHHLETTVEDRKELQGITYKQMKNSAFFNDIIKVRINHLGGIVSVGEY

SEQ ID NO: 143 - protein, 1436 aa, Capnocytophaga gingivalis
  source 1..1436: note = ATCC 33624
MKYIKYILGLDIGSNSIGWALIQLDLLQKTKRIIAAGSRIIPMDQKVLSDFGKGITISPTAQRTSYRNARHCRERHLLRRERLHRVLHILGFLPTHYDKQIDFSKRYGKFVDNTEPKIAYNEGKFLFMDSFQEMLSDFKSHQPDLFYTKKNGEESKIPYDWTIYYLRKKALSQKISKEELAWIILNFNQKRGYYQLREEEGNKENDFEIISSKIISVIKKDKDKKYNKYWYDIILENGLVYQAAFYNDFVYNWINQDREFIIERTSLKNGAEKVKLSYLPTFDEIDKMDKKEQDKYYKKIKIKTENSIGNKTVGCYIYDHILQNPNEKIKGKLVRTIERKYYKEELKAILEKQIALQPELFTDQLLADCIRELYSKNEAQQRNLAARDFVHLLVEDIIFYQRPLRRQKSTLANCSLESRSYIDKDSHTRKEAPLKVCPKSNPYYQEFRVLQWLQNLKIYEIDSDQEVTHQFIKTLEDKQQLFEFLMAQKEIDCEELLKYFLNQTYPNAKEKALKSELKKWKDTYRWNYVYDIGEKSSKKYPMNETRYELKRHLEKVANLPDDFLSSEVEYLLWHLIYSVKDKVAYEKGLKKFAQKHHLDKDSFVESFKKFNPYPSEYGSFSEKAIRKLLPLMRFGAHWDFNHIDKNTQKRIEDLITGVENEEIRTILREKAEKYQLEKETDFQDLPLWLAQYIVYNRHAEASSLEKWTSVNDLETYLNEFKQHSLRNPIVEQVVMETLRVVRDIWQQYGQGQASFFNEIHIELGRELKKTAKEREKLSKQNQKNEDINLSIKEKLKELEKYNTRAYSITHQEKYKLWLEQKHISPYTGQIISPENLFTDNYEIEHIIPQSRFFDDSLSNKVVCESIVNKAPYKDRQLGLEFIKNQGGRIVKELSKENKTIKIFTEEQYRTFIKEHYSNNPEKTKKLLLEEIPEKMVARQMNDTCYISKFISEILSKIVRSDEQDEGVHSKNVILCTGKITSILRQDWGLNDIWDNLILPRFERMNNLLQKEKFTIYSIEKQKKIPVVPINDQFKSFQKKRIDHRHHAMDAIIIACTTREHINYINNQHALEKEKDKKEKQEERDKLREKLCIKKYNNRSEGNYSWIFKKPWDTFTQEVRVALEDIVVSFKQNLRVINKATNYYERWVEENGKYIKKMVKQEGTNWAIRKPLHEETISGKIYLDREKITKNDILTATRKTVDSSFDDKRIKKITDTGIQKILLNYLKYKGSPEIAFSPEGLEELNKNLSIYNDGKPHKPIYKVRIYEKGSGRFALGEKGRKYKKYVQGASNLYFGIYQGAKRSFATIPLNEVIERQKQGLPSVPEYNEKGDLLLFSLSPNDLVYVPIEGEIIENIDFRNLSKEQKERIYNVNDFSSTCYFTPNRIAKAIFPKEVDLQRKGDKLSGSYDTKTASLEGIQIKEVCIKLKVDRLGNISKA

SEQ ID NO: 144 - protein, 1426 aa, Capnocytophaga ochracea
MKNILGLDLGTTSIGFAHIVEDENKEKSEIKELGVRIVSLTTDEQSDFEKGKSITTNANRTLKHGARLNLDRYQQRRKYLIDLLQKANLITPSSILAENGKNTTHSTWQLRAKAVTERIEKEEFARILLAINKKRGYKSSRKAKTEDEGQAIDGMAIAKRLYDENLTPGQLSLQLLQQNKKLLPDFYRSDLQKEFDLVWNFQKQFYPDILTDIFYKELQGKGKDATSKAFSKRYHFDTTENKGSKESVRLQAYQWRAEAISKQLSKEEVAYVLTEINNNLNNASGYLGAISDRSKELYFNRQTVGQYLYAKLQENRHNSLKNKVFYRQDYLDEFERIWETQASFHKELTDELKKQIRDVVIFYQRKPKSQKGLISFCEFESKEIEIEKDGKTITKNIGARVVPKSSPLFQEFKIWQILNNVICKRKGIRKKKISAKTTQLDLLNESSQTIFSLDMECKQLLFDELNLKGDLKSDKVLKLLGYSPQEWEINYNQLEGNRTQKALYEAYLKIVEMEAHDVKDILQIKSAKDDWSLDESPLSASEIREKVKAIFQTLGICTKILYFDPLLPVKEFEEQDSYQLWHLLYSYESDDSTSGNETLYRILEKKYAFKREHARILANVALQDDYGSLSTKAIRKIYPNIKENQYSTACEKAGYKHSKLSLTTEELEARELKNIIPLLKKNALRNPVVEKILNQMINVVNALIEKNSERDAEGKITKYFHFDEIRIELARELKKNAQKRYEMTQNINKAKLEHQKISEILQKEFGIKNPTKSDIIRYRLYQELEHNGYKELYTNAPIARDMLFSKNIEIEHIVPKARVFDDSFSNKTLTFHRINSDKGEYTAFDYITSLNSEEELNQYLTRVENAYKTKSISPTKYKNLLKKASEIGDDFINRDLRDTQYIAKKAKEILFQVTKNVLSTSGSITDRLREDWGLVDVMKELNMPKYQSLGLTEVEERKDGNKVTVIKNWTKRNDHRHHAMDALTVAFTKPSYIQYLNHLNARKDENNKNYSVILAIEEKETIKVPTNNGKNKRVFIEPIPNFRQVAKKHLEEIFISHKAKNKVVTKNTNKPAGTDKQQITLTPRGQLHKETIYGKYQYYINKEEKIGVKFDERTIAKVSNPVYREALLKRLQANDNDPKKAFAGKNALSKNPIYLDESKTKTLPEKVNLTYLEEDFSIRKDISPDNFKDLKSIEKVIDQGVKRILIKRLQAYDNDPKKAFVDLEKNPIWLNKEKGIAIKRVTISGVNNAQPLHIGKDHLGKTTLNKEGKEIPVDYVSTGNNHHVAIYRDKEGNLQEQIVSFFDAVVRAQQGIPIIDKTYKQAEGWQFLFTMKQNEMFVFPNATTGFNPAEIDLLDPKNKKLISPNLFRVQKIATKDYFFRHHLETNVETDNILKNVTWKREGLSGLKDIVKVRINHLGDIVSIGEY

SEQ ID NO: 145 - protein, 1437 aa, Capnocytophaga sp.
  source 1..1437: note = CM59
MKYIKYILGLDIGSNSIGWALIQLDLLQKTKRIIATGSRIIPMDQKVLSDFGKGITISPTAQRTSYRNARHCRERHLLRRERLHRVLHILGFLPTHYDKQIDFSKRYGKFVDNTEPKIAYNERKFLFMDSFQEMLADFKIHQPDLFYTKKNGEESKIPYDWTIYYLRKKALSRKISKEELAWIILNFNQKRGYYQLREEEEENKENDFEIISSKIISVIKKDKDKKYNKYWYDIILENGLVYQAAFYNDFVYNWINQDREFIIERISLKNGTEKVKLSYLPTFDEIDKMDKKEQDKYYKKIKIKTENSIGNKTVGCYIYDHILQNPNEKIKGKLVRTIERKYYKEELKAILEKQVALQPELFTDQLFADCIRELYSKNEAQQRNLAARDFVHLFVEDIIFYQRSLRRQKSTLANCSLESRSYIDKDSHTRKEAPLKVCPKSNPYYQEFRVLQWLQNLKIYEIDTDQEVTHEFIKTLEDKQQFFDFLMNQKEIDCEELLKYFLNQTYPNAREKALKSELKKWKDTYRWNYVYDIGEKSSKKYPMNETRYELKRHLEKVANLPDDFLSSEVEYLLWHLIYSVKDKVAYEKGLKTFAQKHHLDKDSFVESFKKFKPYPSEYGSFSEKAIRKLLPLMRFGSYWDFNHIDKNTQKRIEDLITGVENEEIRTILREKAEKYQLEKETDFQDLPLWLAQYIVYNRHAEASSLEKWTSVNDLETYLNEFKQYSLRNPIVEQVVMETLRVVRDIWQQYGQGQASFFDEIHIELGRELKKTAKEREKLSKQNQKNEDINLSIKEKLKELEKYNTRAYSITHQEKYKLWLEQKHISPYTGQIISPENLFTDNYEIEHIIPQSRFFDDSLSNKVVCESIVNKAPYKDRQLGLEFIKNQGGRIVKELSTENKTIKIFTEEQYRTFIKEHYSNNPEKTKKLLLEEIPEKMVARQMNDTCYISKFISEILSKIVRSDEQDEGVHSKNVILCTGKITSALKQDWGVNDVWNDLILPRFERMNDLTQSTLFTTYNEKYQKYLPTVPMEYSNGFQKKRIDHRHHAMDAIIIACATREHINYINNQHALEKGKDKKEKQKEHDKLREKLCIKKDNKGSEENYSWIFKKPWDTFTQEVQAALEGIVVSFKQNLRVINKATNYYERWVEENGKYIKKMVKQEGTNWAIRKPLHEETISGKIYLDREEITKNDILTATRKTVDSSFDEKRIKKITDTGIQKILLNYLKYKGSPEIAFSPEGLEELNKNLSIYNDGKPHKPIYKVRIYEKGSGRFALGEKGRKYKKYVQGAPNLYFGIYQGANKRSFATIPLNEVIERQKQGRPSIPEYNEKGDPLLFSLSPNDLVYVPVEGEIIEDIDFQNLSKEQKERIYNVNDFSSTCYFTPNRIAKAIFPKEVDLQRKGDKLPGSYDTKTASLEGIQIKEVCIKLKIDRLGNISKA

SEQ ID NO: 146 - protein, 1471 aa, Capnocytophaga sp.
  source 1..1471: note = oral taxon 324 str. F0483
MCKYFYIKNFITFVLSKSIIPMKHILGLDLGSNSIGWAFVQQDFENKQGKIIATGSRIIPMDQGILGDFERGNTVSQTAERTTYRSTRRLRERHLLRRERLHRVLHILGFLPPHYDAQIDFTKRYGKFIDNAEPKIAYNNGNFIFMNSFNEMIEDFKKHQPQLFYKKSNGEESKIPYDWTIYYLRKKALSQKITQQELAWLILHFNQKRGYYQLRGEEETENPNKEVAFHSLKVVDVEAEAPNKKGEIWYTIRLENGWIYRRTSKIPLDDWKGKTRDFIVTTDLNDDGTIKVDKEGKEKRSFRAPDENDWNLLKKKTEHDIDFSGKTVGAYIYDHLLQNPNQKIKGKLVRTIERKYYKDELKAILAKQIALQPELFTETLLADCIRELYRKNETQQQNLLSKDFLHLFVEDIIFYQRPLRSKKSTIANCTLEKRSYIDKETNERKDAPIKVCAKSNPYYQEFRVLQWLQNLRIYEIETDREVTAEFIETPQDCEALFNFLMSQKEIDNKGLLKYFLFAKNPQIKDKAAKSELKKWLTTYRWNYVYDAADNSSKKYPMNETGYELQRYLQKVEGLPANFLTFDITYQLWHLLYSVKDKVEFEKALKKFAKKKQLDKTSFVDSFKNFKPYPNEYGSFSEKAIKKLLPLMRFGNHWDFNRIDVSTQKRIDDLINGVANEDIRTIIREKAEKYQLNSETCFQDLPLWLAQYVVYNRHAEATDIEKWTSVSDLEAYLEDFKQHSLRNPIVEQVVTETLRVVRDIWQQYGGGQANFFDEIHIELGRELKKTAEERKQLSDKNQENESTNLRIKKLLAELKEDASIQNVRPYSLVQQELLKIYEEGVFSATDEVEEDIQKIRKKAEPSKADLQRYKLWLEQKYKSPYTGEVISLTKLFTEEYEIEHIIPQSRYYDDSLSNKVICESAVNKLKTNQLGLEFIQNHHGEKVRITANKEVTIFTEEQYKEFVKKHYANNSAKQQKLLLNEIPEKMVARQLNDTRYISKYISEILSKIVRSDEKDEGVNSKNIIPCTGKITTALKQDWGLNDVWNKLILPRFERMNQLTQTQLFTSYNDRLQKNLPTVPIEYSQGFQKKRIDHRHHAMDALVIACATREHINYMNNQHALDKSKDKKEKQQSRIDLRTILCEKKNNNWQFKKPWSTFTQEAKEALEHIVVSFKQNLRVINKATNYYEKWEEKNGVLVKKKVKQEGTNWAIRKPLHKETVSGKIVLDRKIGKDKILTATRKAVDITFTEKIISSITDTGIQKILLNYLKYKGSPEVAFSTEGLEELNKNIAQYNNGKKHQPIYKVRIFEEGSKFPLGETGAKATKYVEAAKGTNLFFGVYQGKGKRTYATIPLNEVIERQKQGLPSVPERNEKGEPLLFSLSPNDLVYVPMEGEIAETIDFNNLSKEQKERIYKTVSFTGNQCFFVQEAVATPIVNKMEYSPLNKMERDILGTMIKEVCIKLKVDRLGNITKA

SEQ ID NO: 147 - protein, 1450 aa, Capnocytophaga sp.
  source 1..1450: note = oral taxon 326 str. F0382
MKRILGLDLGSNSIGWAFVEQDFENKQGKIIATGSRIIPMDQGILGDFEKGNTVSQTAERTTYRSMRRLRERHLLRRERLHRVLHILGFLPPHYDAQIDFTKRYGKFIDNAEPKIAYNNGNFIFMNSFNEMIEDFKKYQPQLFYKKSNGEESKIPYDWTIYYLRKKVLSQKITQQELAWLILHFNQKRGYYQLRGEEETENPNKEVAFHSLKVVDVEAEAPNKKGEIWYTIRLENGWIYRRTSKIPLDDWKGKTRDFIVTTDLNDDGTIKVDKEGKEKRSFRAPDENDWNLLKKKTEHDIDFSGKTVGAYIYDHLLQNPNQKIKGKLVRTIERKYYKDELKAILAKQIALQPELFTETLLADCIRELYRKNETQQQNLLSKDFLHLFVEDIIFYQRPLRSKKSTIANCTLEKRSYIDKETNERKDTFIKVCAKSNPYYQEFRVLQWLQNLRIYEIETDREVTAEFIETAEDYEALFNFLMSQKEIDNEGLLKYFLFAKNPQIKDKVAKSELKKWLTTYRWNYVYDAADNSSKKYPMNETGYDLQRYLQKVEGLPANFLTFDITYRLWHLLYSVKDKVEFEKALKKFAQEYQLDEASFVDSFKNFKPYPNEYGSFSEKAIKKLLPLMRFGNHWDFNRIDVSTQKRIDDLINGVANDEIRTIIREKAEKYQLNSESCFQGLPLWLAQYVVYNRHAEATDIEKWTSVSDLETYLEDFKQHSLRNPIVEQVVTETLRVVRDIWQQYGGGQANFFDEIHIELGRELKKTAEERKQLSNRNQENENTNLRIKKLLAELKEDASIQNVRPYSPVQQELLKIYEEGVFSSTDQVEEDIQKIRKKAEPTTPEIQRYKLWLEQKYKSPYTGEVISLTKLFTEEYEIEHIIPQSRYYDDSLSNKVICESAVNKLKTNQLGLEFIQNHHGEKVRITGNKEVTIFTEEQYKEFVKKHYANNSAKQQKLLLNEIPEKMVARQLNDTRYISKYISEILSKIVRSDEKDEGVNSKNVIPCTGKITTALKQDWGLNDVWNELILPRFERMNQLTQTQLFTSYNDRFQKNLPTVPIEYSQGFQKKRIDHRHHAMDALVIACATREHINYMNNQHALDKNKDKKEKQQSRIDLRTILCEKKNNNWQFKKPWSTFTQETKEALEHIVVSFKQNLRVINKATNYYEKWEEKNGVLVKKKVKQEGTNWAIRKPLHKETVSGKIVLDRKIGKDKILTATRKEVDITFTEKIISSITDTGIQKILLNYLNYKGSPEVAFSAEGLEELNKNIAQYNDGKKHQPIYKVRIFEEGSKFPLGETGAKATKFVEAAKGTNLFFGVYQGKEKRSYATIPLNEVIERQKQGLPSVPERNEKGEPLLFSLSPNDLVYVPMEGEIAETIDFNNLSKEQKERIYKTVSFTGNQCFFVQEAVATPIVNKMEYSPLNKMERDILGTMIKEVCIKLKVDRLGNITKA

SEQ ID NO: 148 - protein, 1435 aa, Capnocytophaga sp.
  source 1..1435: note = oral taxon 329 str. F0087
MKNILGLDLGTTSIGFAHIVEDENKEKSEIKELGVRIVSLATDEQSDFEKGKSISTNANRTLKHGARLNLDRYQQRRKFLIDLLQKANLITSASILAENGKNTTHSTWQLRAKAVTERIEKEEFARVLLAINKKRGYKNSRKTKTEDEGQAIDGMAIAKCLYDENLTPGQLSLQLLQQNKKLLPDFYRSDLQKEFDLVWNLQKQFYPDILTDSFYKELQGKGKDATSKAFSKRYHFDTAENKGSKESVRLQAYQWRAEAISKQLSKEEVAYVLTEINNNLNNSSGYLGAISDRSKELYFNRQTVGQYLYAQLQENRHNSLKNKVFYRQDYLDEFERIWETQASFHKELTDELKKQIRDVVIFYQRKLKSQKGLVSFCEFESKEIEIEKDGKAITKSIGARVVPKSSPLFQEFKIWQILNNVTCKRKGIRKKKSSAKSTELDLFNEPSQSIFSLDMECKQLLFDELNLKGDLKSDKVLKLLGYSPQEWEINYNQLEGNRTQKSLYEAYLKIIEIEGYEVKDILQIKSTKDDWSLDESPLSASEIRERVKVIFQTLGICTKILYFDPLLPVKEFEQQYSYQLWHLLYSYESDDSTSGNETLYRILEKKYAFKREHATILANVALQDDYGSLSTKAIRKIYPYIKENQYSTACELAGYKHSKLSLTTEELEARELKNIIPLLKKNALRNPVVEKILNQMINVVNALIEKNSERDAEGKITKYFHFDEIRIELARELKKNAQERYEMTQNINKAKLEHQKISEKLQKQFGIKNPTKSDIIRYRLYQELEHNGYKELYTNTYIAPDVLFSKNIDIEHIVPKARVFDDSFSNKTLAFKEFNIKKGESTAFDYITSLNCEGELNQYLTRVENAYKTKSISLTKYKNLLKKASEIGDGFINRDLRDTQYIAKKAKEILFQVTKNVLSTSGSITDRLREDWGLVDVMKELNMPKYQSLGLTEVEERKDGNKVTVIKDWTKRNDHRHHAMDALTVAFTKPSYIQYLNHLNARKDENNKNYSVILAIEKKETIKVPINNGKNKRVFIEPILNFRQVAKKHLEEIFISHKAKNKVVTKNINKPAGTDKQQITLTPRGQLHKETIYGKYQYYVNKEEKVGVKFDERTITKVSNPLYREALLKRLQANDNDPKKAFAGKNALSKNPIYLDEAKTKTLPEKVNLTYLEEDFSIRKDISPDNFKDLKSIEKVIDQGVKRILIKRLQAYDNDPKKAFVDLEKNPIWLNKEKGIAIKRVTISGVSNAQPLHIGKDHLGKTTLNKEGKEVPVDYVSTGNNHHVAIYRDKEGNLQEQIVSFFEAVVRAQQGLPIIDKNYKQAEGWQFMFTMKQNEMFVFPNEATGFNPAEIDLLDPKNKKLISPNLFRVQTISIVKYGNSVVRDFKFRHHLETTLQDDKILQGITFQQIKSLEPLRNIVKVRINHLGDIVNIGEY

SEQ ID NO: 149 - protein, 1426 aa, Capnocytophaga sp.
  source 1..1426: note = oral taxon 335 str. F0486
MKNILGLDLGTTSIGFTHIVEDENKEKSEIKELGVRIVSLTTDEQSDFEKGKSISTNANRTLKHGARLNLDRYQQRRKFLIDLLQKANLITSSSILAENGKNTTHSTWQLRAKAVTERIEKEEFARVLLAINKKRGYKSSRKAKTEDEGQAIDGMAIAKRLYDENLTPGQLSLQLLQQNKKLLPDFYRSDLQKEFDLVWNFQKQFYPDILTDSFYKELQGKGKDATSKAFSKRYHFDTAENKGSRESVRLQAYQWRAEAISKQLSKEEVAYVLTEINNNLNNASGYLGAISDRSKELYFNRQTVGQYLYAQLQENKHNSLKNKVFYRQDYLDEFERIWETQASFHKELTEELKKQIRDVVIFYQRKLKSQKGLISFCEFESKEIEIEKDGKTITKSIGARVVPKSSPLFQEFKIWQILNNVTCKRKGIRKKKSSAKSTELDLFNEPSQTIFSLDMECKQLLFEELNLKGDLKSDKVLKLLGYSPQEWEINYNQLEGNRTQKALYEAYLKIVEMEAHDVKDILQIKSTKDDWALEESPLSASEIRERVKAIFQTLGICTKILYFDPLLPVKEFEEQDSYQLWHLLYSYESDDSTSGNETLYRILEKKYAFKREHATILANVTLQDDYGSLSTKAIRKIYPYIKENQYSTACEKAGYKHSKLSLTTEELEARELKNIIPLLKKNALRNPVVEKILNQMINVVNALIEKNSERDAEGKITKYFHFDEIRIELARELKKNAQERYEMTQNINKAKLEHQKISGILQKEFGIKNPTKSDITRYRLYQELAHNGYNDLYTNTYIPKELLFSKNIDIEHIVSKARVFDDSFSNKTLAFREFNIKKGESTAFDYITSLNNEEELNQYLNRVENAYKTKNISPAKYKNLLKKASEIGDGFINRDLRDTQYIAKKAKEILFQVTKNVLSTSGSITDRLREDWGLVDVMKELNMPKYQSLGLTEVEERKEGNKVTVIKNWTKRNDHRHHAMDALTVAFTKPSYIQYLNHLNARKDKNNKNYSVILAIEEKETIKVPTNNGKNKRVFIEPIPNFRQVAKKHLEEIFISHKAKNKVVTKNTNKPAGTDKQQITLTPRGQLHKETVYGKYQYYVNKEEKIGVKFDKETIAKVSNPVYREALLKRLQANDNDPKKAFAGKNALSKNPIYLDEAKTKTLTEKVNLTYLEEDFSIRKDISPDNFKDLKSIEKVIDQGVKRILIKRLQDYDNDPKKAFVDLEKNPIWLNKEKGIAIKRVTISGVNNAQPLHIGKDHLGKTTLNKEGKEIPVDYVSTGNNHHVAIYRDKEGNLQEQIVSFFEAVVGAQQGLPIVDKTYKQAEGWQFLFTMKQNEMFVFPNEATGFNPAEIDLLDPKNKKQISPNLFRVQKIATKDYFFRHHLETNVDTDNVLKNTTWKREGLSGLKDIVKVRINHLGDIVSIGEY

SEQ ID NO: 150 - protein, 1432 aa, Capnocytophaga sp.
  source 1..1432: note = oral taxon 380 str. F0488
MKNILGLDLGTTSIGFAHIVEDENKEKSEIKELGVRIVSLTTDEQSDFEKGKSITTNANRTLKHGARLNLDRYQQRRKYLIDLLHKANLITPSSILAENGKNTTHSTWQLRAKAVTERIEKEEFARILLAINKKRGYKSSRKAKTEDEGQAIDGMAIAKRLYDENLTPGQLSLQLLQQNKKLLPDFYRSDLQKEFDLVWNFQKQFYPDILTDIFYKELQGKGKDATSKAFSKRYHFDTAENKGSKESVRLQAYQWRAEAVSKQLSKEEVAYVLTEINNNLNNASGYLGAISDRSKELYFNRQTVGQYLYAQLQENRHNSLKNKVFYRQDYLDEFERIWETQALFHKELTDELKKQIRDVVIFYQRKPKSQKGLISFCEFESKEIEIEKDGKTITKNIGARVVPKSSPLFQEFKIWQILNNVICKRKGIRKKKISAKTTQLDLLNESSQTIFSLDMECKQLLFDELNLKGDLKSDKVLKLLGYSPQEWEINYNQLEGNRTQKALYEAYLKIVEMEAHDVKDILQIKSTKDDWSLDESPLSASEIRESVKAIFQALGICTKILYFDPLLPVKDFEEQDSYQLWHLLYSYESDDSTSGNETLYRILEKKYAFKREHARILANVALQDDYGSLSTKAIRKIYPNIKENQYSTACEMAGYKHSKLSLTTEELEARELKNIIPLLKKNALRNPVVEKILNQMINVVNALIEKNSERDAEGKITKYFHFDEIRIELARELKKNAQKRYEMTQNINKAKSEHQKISEILQKEFGIKNPTKSDIIRYRLYKELEHNGYKELYTNTYIAPDVLFSKNIDIEHIVPKARVFDDSFSNKTLAFKDFNIKKGESTAFDYITSLKNEEKLNQYLARVENAYKTKNISPAKYKNLLKKASEIGDGFINRDLRDTQYIAKKAKEILFQVTKNVLSTSGSITDRLREDWSLVDVMKELNMPKYQSLGLTEVEERKDGNKVTVIKDWTKRNDHRHHAMDALTVAFTKPSYIQYLNHLNARKDENNKNYSVILAIEKKETIKVPTNNGKNKRVFIEPIPNFRQVAKKHLEEIFISHKAKNKVVTKNTNKPAGTNKQQITLTPRGQLHKETIYGKYQYYVNKEEKVGVKFDKETIAKVSNPLYREALLKRLQANDNDPKKAFTGKNALSKNPIYLDEAKTKTLPEKVNLTYLEEDFSVRKKIVPKNPTSKEFVPNLKSIEKVVDEGVRNILIERLRVYNNDPEKAFVDLEKNPIWLNKEKGIAIKRVTISGVNNAQPLHIGKDHLGKTTLNKEGKEIPVDYVSTGNNHHVAIYRDKEGNLQEQIVSFFEAVVRTQQGLPIIDKTYKQEEGWQFLFTMKQNEMFVFPNEATGFNPAEIDLLDPKNKKQISPNLFRVQKIATKDYFFRHHLETNVETDNVLKNTTWKREGLSGLKDIVKVRINHLGDIVSIGEY

SEQ ID NO: 151 - protein, 1450 aa, Capnocytophaga sp.
  source 1..1450: note = oral taxon 412 str. F0487
MKHILGLDLGSNSIGWAFVQQDFENKQGKIIATGSRIIPMDQGILGDFERGNTVSQTAERTTYRNTRRLRERHLLRRERLHRVLHILGFLPPHYDSQIDFTKRYGKFIDNAEPKIAYNNGNFIFMNSFNEMIEDFKKYQPQLFYKKSNGEESKIPYDWTIYYLRKKALSQKITQQELAWLILHFNQKRGYYQLRGEEETENPNKEVAFHSLEVVDVEAEAPNKKGEIWYTIRLENGWIYRRTSKIPLDDWKGKTRDFIVTTDLNDDGTIKLDKEGKEKRSFRAPDENDWNLLKKKTEHDIDFSGKTVGAYIYDHLLQNPNQKIKGKLVRTIERKYYKDELKAILAKQIALQPELFTETLLADCIRELYRKNETQQQNLLSKDFLHLFVEDIIFYQRPLRSKKSTIANCTLEKRSYIDKETNERKDTPIKVCAKSNPYYQEFRVLQWLQNLRIYEIETDREVTAEFIETAQDNEALFNFLMSQKEIDNESLLKYFLFAKNPQIKDKVAKSELKKWLTTYRWNYVYDAADNSSKKYPMNETGYELQQYLQKVEGLPANFLTFDITYRLWHLLYSVKDKVEFEKALKKFAQEYQLDEASFVDSFKNFKPYPNEYGSFSEKAIKKLLPLMRFGNHWDFNRIDVSTQKRIDDLINGVANDEIRTIIREKAEKYQLNSETCFQGLPLWLAQYVVYNRHAEAADIEKWTSVNDLEAYLEDFKQHSLRNPIVEQVITETLRVVRDIWQRYGGGQANFFDEIHIELGRELKKTAEERKQLSNRNQENENTNLRIKKLLAELKEDASIQNVRPYSPVQQELLKIYEEGVFSATDEVEEDIQKIRKKAEPTTPEIQRYKLWLEQKYKSPYTGEVISLTKLFTEEYEIEHIIPQSRYYDDSLSNKVICESAVNKLKTNQLGLEFIQNHHGEKVRITANKEVTIFTEEQYKEFVKKHYANNSAKQQKLLLNEIPEKMVARQLNDTRYISKYISEILSKIVRSDEKDEGVNSKNIIPCTGKITTALKQDWGLNDVWNELILPRFERMNQLTQTQLFTSYNDRFQKNLPTVPIEYSQGFQKKRIDHRHHAMDALVIACATREHINYMNNQHALDKSKDKKEKQQSRIDLRTILCEKKNNNWQFKKPWSTFTQEAQEALEHIVVSFKQNLRVINKATNYYEKWEEKNGVLVKKKVKQEGTNWAIRKPLHKETVSGKIVLDRKIGKDKILTATRKSVDITFTEKIISSITDTGIQKILLNYLKYKGSPEVAFSAEGLEELNKNIAQYNDGKKHQPIYKVRIFEEGSKFPLGETGAKATKYVEAAKGTNLFFGVYQGKGKRTYATIPLNEVIERQKQGLPSVPERNEKGEPLLFSLSPNDLVYVPMEGEIAETIDFNNLSKEQKERIYKTVSFTGNQCFFVQEAVATPIVNKIEYSPLNKMERDILGTMIKEVCIKLKVDRLGNITKA

SEQ ID NO: 152 - protein, 1426 aa, Capnocytophaga sputigena
  source 1..1426: note = ATCC 33612
MKNILGLDLGITSISFAHIVEDENKEKSEIKELGVRIVSLTTDEQSDFEKGKSITTNANRTLKHGARLNLDRYQQRRKYLIDLLQKANLITSSSILAENGKNTTHSTWQLRAKAVTERIEKEEFARVLLAINKKRGYKSSRKAKTEDEGQAIDGMAIAKRLYDENLTPGQLSLQLLQQNKKLLPDFYRSDLQREFDLVWNFQKQFYPDILTDSFYKELQGKGKDATSKAFSKRYHFDTAENKGSKESVRLQAYQWRAEAISKQLSKEEVAYVLTEINNNLNNASGYLGAISDRSKELYFNRQTVGQYLYAQLQENRHNSLKNKVFYRQDYLDEFERIWETQASFHKELTDELKKQIRDVVIFYQRKLKSQKGLISFCEFESKEIEIEKDGKTITKTIGARVVPKSSPLFQEFKIWQILNNVTCKRKGIRKKKSSAKSTELDLFNEPSQTIFSLDMECKQLLFDELNLKGDLKSDKVLKLLGYSPQEWEINYNQLEGNRTQKALYEAYLKIVEMEAHDVKDILQIKSAKDDWSLDESPLSASEIKEKVKDIFQALGICTKILYFDPLLPVKEFEKQDSYQLWHLLYSYESDDSTSGNETLYRILEKKYAFKREHARILANVALQDDYGSLSTKAIRKIYPNIKENQYSKACELAGYKHSKLSLTTEELEARELKNIIPLLKKNALRNPVVEKILNQMINVVNALIEKNSERDAEGKITKYFHFDEIRIELARELKKNAQKRYEMTQNINKAKLEHQKISEILQKKFGIKNPTKSDIIRYRLYQELEHNGYKELYTNAPIARDMLFSKNIEIEHIVPKARVFDDSFSNKTLTFHRINSNKGEYTAFDYITSLNSEEELNQYLTRVENAYKTKSISLTKYKNLLKKASEIGDGFINRDLRDTQYIAKKAKEILFQVTKNVLSTSGSITDRLREDWGLVDVMKELNMPKYQSLGLTEVEERKEGNKVTVIKNWTKRNDHRHHAMDALTVAFTKPSYIQYLNHLNARKDENNKNYSVILAIEEKETIKVPTNNGKNKRVFIEPIPNFRQVAKKHLEEIFISHKAKNKVVTKNVNKPAGTDKQQITLTPRGQLHKETIYGKYQYYVNKEEKVGVKFDERTITKVSNPLYREALLKRLQANDNDPKKAFTGKNALSKNPIYLDETKTKTLPEKVNLTYLEEDFSIRKDISPDNFKDLKSIEKVIDQGVKRILIKRLQDYDNDPKKAFVDLEKNPIWLNKEKGIAIKRVTISGVSNAQPLHIGKDHLGKTTLNKEGNEIPVDYVSTGNNHHVAIYRDKEGNLQEQIVSFFEAVVRTQQGLPIIDKTYKQEEGWQFLFTMKQNEMFVFPNATTGFNPAEIDLLDPKNKKLISPNLFRVQKIATKDYFFRHHLETNVETDNVLKNTTWKREGLSGLKDIVKVRINHLGDIVSIGEY

SEQ ID NO: 153 - protein, 1140 aa, Catellicoccus marimammalium
  source 1..1140: note = M35/04/3
MKNMTKVNVGLDVGISSAGWSVINAETNQILESGVRLFSGSDADENVNRRNQRQGRRLFRRRKLRIQEAKKYLENVFQLKDIEPKDEWNPYEIRVRALNEKVSKEELSIALLNIVKHRGISYELEDVTDEEGTNTQSFQSGLDYNRRLLKTKTVGEIQYDRLQKYGQVRGQIQTEDGLLINIFPTKNYVEEVERILETQKKYHPEIDDVFIEKIISFVTRKREYFVGPGNEKSRTDYGIYRENGETLDNLFEILIGKDKFYPEEYRAAGSSYTAQIFNLLNDLNNLRIPTTEDHHLTKAQKEEIITELKNTSRLSGGMLKLISKVTKAPKEEISGYRKDEKDKPDLHSLAYYRKQKNMLEKEGIQIADFSEELLDELATMMTLNTEPGEIRKQLNKITNQYDILTPEVIEVLVKNHTAFVATSNHKWHRFSLKLMKEFIPELLETSKEQSTILCERGFIQNRASYLDENHHFNYAELRENLYNPVVRKSTCEMLKVFTAIQEKYPNIQNVIVELPRETNEDEQKRKIKKINDNNAKRKKEILKEAQAQSGLSEEALEEKLLKTKGLYLKLMLWYEQEGKCVYSGQEIPLSDLLQNKGGYEVDHIIPISISFDDRLCNKVLVRQQLNSQKSNQTPFEYMTTHTDGHLSFHELKELVGKNKRFSKEKRELLLAEIYSNDIETRKRFINRNLVDTSYTARIVLNALQQYKKENQLSMNVSVVRGAMTNILRKKVKLDKTRETFHHHAIDASLMAVIPNIEFFKERKEWLPKSANEEVVEVEVSEEETMPEKEFKVKMRLPESFIQDVQILQRNSFAKEEVSGPQTRERNLKIKFSHQVDQKMNRKVADDTIYGTRQAQLGKDKKEETYVIGKIKDIYNYDEYVRFKKRYDKNKESFLMYHHDPQTFEKLEEILAQYPEYIEDEKGKKKKVSPFALYREENGPVTKYAKKNNGPVIKQLKYYDSKLNRKIDISHKYSTKNRQVVLQSLKPYRTDVYRNQDTGEYTLVGIDQNDGKFVNGHYGIPKSRYEEIKANNKLSEHDEFVFSLYKNSMVKVIDENGESIVVRYLSRSMPNRKNNAEIKPVEKYQFEDGEVVPVYGKCRKQMQTVFVKKGWTLLKGNTDILGNTYFVEKESENPKKMIDDK

SEQ ID NO: 154 - protein, 1329 aa, Catenibacterium mitsuokai
  source 1..1329: note = DSM 15897
IVDYCIGLDLGTGSVGWAVVDMNHRLMKRNGKHLWGSRLFSNAETAANRRASRSIRRRYNKRRERIRLLRAILQDMVLEKDPTFFIRLEHTSFLDEEDKAKYLGTDYKDNYNLFIDEDFNDYTYYHKYPTIYHLRKALCESTEKADPRLIYLALHHIVKYRGNFLYEGQKFNMDASNIEDKLSDIFTQFTSFNNIPYEDDEKKNLEILEILKKPLSKKAKVDEVMTLIAPEKDYKSAFKELVTGIAGNKMNVTKMILCEPIKQGDSEIKLKFSDSNYDDQFSEVEKDLGEYVEFVDALHNVYSWVELQTIMGATHTDNASISEAMVSRYNKHHDDLKLLKDCIKNNVPNKYFDMFRNDSEKSKGYYNYINRPSKAPVDEFYKYVKKCIEKVDTPEAKQILNDIELENFLLKQNSRTNGSVPYQMQLDEMIKIIDNQAEYYPILKEKREQLLSILTFRIPYYFGPLNETSEHAWIKRLEGKENQRILPWNYQDIVDVDATAEGFIKRMRSYCTYFPDEEVLPKNSLIVSKYEVYNELNKIRVDDKLLEVDVKNDIYNELFMKNKTVTEKKLKNWLVNNQCCSKDAEIKGFQKENQFSTSLTPWIDFTNIFGKIDQSNFDLIENIIYDLTVFEDKKIMKRRLKKKYALPDDKVKQILKLKYKDWSRLSKKLLDGIVADNRFGSSVTVLDVLEMSRLNLMEIINDKDLGYAQMIEEATSCPEDGKFTYEEVERLAGSPALKRGIWQSLQIVEEITKVMKCRPKYIYIEFERSEEAKERTESKIKKLENVYKDLDEQTKKEYKSVLEELKGFDNTKKISSDSLFLYFTQLGKCMYSGKKLDIDSLDKYQIDHIVPQSLVKDDSFDNRVLVVPSENQRKLDDLVVPFDIRDKMYRFWKLLFDHELISPKKFYSLIKTEYTERDEERFINRQLVETRQITKNVTQIIEDHYSTTKVAAIRANLSHEFRVKNHIYKNRDINDYHHAHDAYIVALIGGFMRDRYPNMHDSKAVYSEYMKMFRKNKNDQKRWKDGFVINSMNYPYEVDGKLIWNPDLINEIKKCFYYKDCYCTTKLDQKSGQLFNLTVLSNDAHADKGVTKAVVPVNKNRSDVHKYGGFSGLQYTIVAIEGQKKKGKKTELVKKISGVPLHLKAASINEKINYIEEKEGLSDVRIIKDNIPVNQMIEMDGGEYLLTSPTEYVNARQLVLNEKQCALIADIYNAIYKQDYDNLDDILMIQLYIELTNKMKVLYPAYRGIAEKFESMNENYVVISKEEKANIIKQMLIVMHRGPQNGNIVYDDFKISDRIGRLKTKNHNLNNIVFISQSPTGIYTKKYKL

SEQ ID NO: 155 - protein, 1419 aa, Chryseobacterium sp.
  source 1..1419: note = CF314
MMIKNILGLDLGTNSIGWALIKQNFENKYGEILGMGSRIIPMSQDVLGEFGKGNSVSQTAARTGYRGVRRLRERFLLRRERLHRVLNVLNFLPEHYASQIDFEKRFGKFKYETEPKLAYNNDGFFFKNSFDEMLGDFKDHQFHLLENGRKVPYDWTIYYLRKKALSQKIEKEELAWILLNFNQKRGYYQLRGEDFEEEKDRVFVRLKVDRVVDSGENIKGKILYDVYFENGWKYEKQIVKTEDWIGRTKEFIVTESILKNGDTKRTFKAVDSEKDWIAIKTKTEQEIDKSHKTVGAYIYEALLQNPKQKIKGKLVRTIERKFYREELKKILERQKEFHPELQSDDLYNDCIRELYRNNEAHQITLSKKDFVHLLLNDLIFYQRPLRSQKSSVSNCTLEFRKYKDENGVEHAQYLKTIPKSNPYYQEFRVWQWMFNLNIYRKDDDTNVTKEFLSSTEDYETLFEFLNNRKEVDQKALLRHFKLNEKTHRWNYVEDKKYPCNETKTMISTRLEKVENYPSDFLTREMEQNIWHIIYSVNDKIEYEKALKSFAHKNNLDENSFFEAFKKFPPFKSEYGSFSEKAIKKLLPLLRLGKYWNWESIDRKSQGRIEKIITGEFDGNIKDKVREKAIHLTAENDFQGLQLWLAQYIVYGRHSEASMIGKWNSADDLEEFLKGFKQHSLRNPIVEQVITETLRVVKDIWLKYGNGAKDFFSEIHIELGREMKQTKDERVDATKRITENENTNLRIKALLAEMMNDNSVENIRPYSPMQQEILKIYEDGILKSDIEIDDDILKISKTAQPSSSDLKRYKLWLEQRYKSPYTGQIIPLNKLFTSEYEIEHIIPQSRYFDDSFSNKIICESAVNKLKDNYIGLGFIKQFGGMIVECGFGKSVEIFKAEEYEDFVKKHYANNRSKRNKLLLEEIPEKMIDRQLNDTRHISKYISGVLSNIVRQEDGTDEGVNSKNIVPGNGKITTQLKQDWGLNDVWNELILPRFERMNQLTNSTDFTSWNKNHQKFLPTVPIEFSKGFSKKRIDHRHHAMDALVIACATKDHINLLNNQSAKSDTKRYDLKRKLMKFERVVYSHSKTGEKIEKEVPKQFLKPWDNFTVDAKNKMETIIVSFKQNLRVINKATNHYEKWIEKDGIKRKELIKQEGTNWAIRKPMHKETVSGKVDLPGIKIPKGKILTATRKSLDTSFDLKTINSITDTGIQKILKNYLEFKGSSELAFSPEGIEDMNKNIEKFNDGKPHQSINKVRIFELGSKFSVGQTGNKKDKYVEAAKGTNLFFAVYEDKNGKRSYETIPLNEVIERQKQGLDSVSFKNKEDFLLCPNDLVYVPSEDELENIYNIDFKNLTTEKTGNIYKVVSFSGNQIFFIRQDIAISIVNKAEFSTLNKMERAIDGSMIKENCIKLKIDRLGNIAKI

SEQ ID NO: 156 - protein, 1021 aa, Clostridium cellulolyticum
MKYTLGLDVGIASVGWAVIDKDNNKIIDLGVRCFDKAEESKTGESLATARRIARGMRRRISRRSQRLRLVKKLFVQYEIIKDSSEFNRIFDTSRDGWKDPWELRYNALSRILKPYELVQVLTHITKRRGFKSNRKEDLSTTKEGVVITSIKNNSEMLRTKNYRTIGEMIFMETPENSNKRNKVDEYIHTIAREDLLNEIKYIFSIQRKLGSPFVTEKLEHDFLNIWEFQRPFASGDSILSKVGKCTLLKEELRAPTSCYTSEYFGLLQSINNLVLVEDNNTLTLNNDQRAKIIEYAHFKNEIKYSEIRKLLDIEPEILFKAHNLTHKNPSGNNESKKFYEMKSYHKLKSTLPTDIWGKLHSNKESLDNLFYCLTVYKNDNEIKDYLQANNLDYLIEYIAKLPTFNKFKHLSLVAMKRIIPFMEKGYKYSDACNMAELDFTGSSKLEKCNKLTVEPIIENVTNPVVIRALTQARKVINAIIQKYGLPYMVNIELAREAGMTRQDRDNLKKEHENNRKAREKISDLIRQNGRVASGLDILKWRLWEDQGGRCAYSGKPIPVCDLLNDSLTQIDHIYPYSRSMDDSYMNKVLVLTDENQNKRSYTPYEVWGSTEKWEDFEARIYSMHLPQSKEKRLLNRNFITKDLDSFISRNLNDTRYISRFLKNYIESYLQFSNDSPKSCVVCVNGQCTAQLRSRWGLNKNREESDLHHALDAAVIACADRKIIKEITNYYNERENHNYKVKYPLPWHSFRQDLMETLAGVFISRAPRRKITGPAHDETIRSPKHFNKGLTSVKIPLTTVTLEKLETMVKNTKGGISDKAVYNVLKNRLIEHNNKPLKAFAEKIYKPLKNGTNGAIIRSIRVETPSYTGVFRNEGKGISDNSLMVRVDVFKKKDKYYLVPIYVAHMIKKELPSKAIVPLKPESQWELIDSTHEFLFSLYQNDYLVIKTKKGITEGYYRSCHRGTGSLSLMPHFANNKNVKIDIGVRTAISIEKYNVDILGNKSIVKGEPRRGMEKYNSFKSN

SEQ ID NO: 157 - protein, 1065 aa, Clostridium perfringens
  source 1..1065: note = C str. JGS1495
MNKDINYALGLDIGITSVGWAVINLDLNRIEDLGVRIFNAAENPKDGSSLALPRRLARGRRRLLRRKAYRVERVRKLIVKNNILTKEELEGLFKNKEVIDVWEARVKGLDYKLSREEWAKILINFCKRRGFKSNRKNETKDKEAGQILSSISYNIEKMKETNSRTIGEYIYNEVKNSDDSYAPLRNKFGEYKMCVSRDVLREEIHTLFEKQRELGNNFASDEIEDKYFEIFNSQRPFSNFEDLEKLVGFCTFERKKHKRAPKHCISSEEFTLYEGINKLSIIKDGEKRKLSEEERTLVVNEAFNKKEIKYTTLRKLLGLSEDELFSTLTYSIDKDISKTENTKFVSLKGYHEIKRAIEKGVSKKAWQDIENNRNLLNDIAYVLTLGKTDDEIEKQLRLRNVPEELFESLLDMSFSKFNNLSIYALEKILPFMKEGYQYNEACEKAGYNFKAIYEGVRTKKLPVIEIDEIVNPVVNRALAQTRKVINSVIDKYGSPVRINIELARDLAKNFKDRKLIEKEQKENRANLDKIRENLRELMDKEPTAVEVLKYRLWEQQRGECAYTQSQIALERLFSPGYCEIDHIIPFSRSFDDSLSNKILVLGSENQRKGNKIPYEYFGEDSERWNSFEIWVKGSYLNYKKKANLLKKKFTEEEQRDWKARNLQDTKYICRYISNFVNNRLEFKESENKQKVITVNGRATAYLRSRWGLNKVREDGDKHHALDAAVVGVTTQGMVQKISKYSKAHELYTVRKNDEFVDVETGECVDVDEYKEIRKDILPRPWRGFSEELKLRLSDNPLEELKKLPIETYNEEFIKENVKPIFVSRVPFRKISGKLFKETIYSERAFKDGYFVSKKSLVDLKRGDLDNFYNYECDKKLYDAISERMKEFNYNGKKAFESPFRKPTKSGKEGPVVRSVKIKSAAPFKDGIPMNEGLVAKEGMVRIDIYEKEGKYFVVPVYRYQLAKGIVPKRAAIAGKSELKWPIMDQTYNFKFSIFKNDLIEIKYAKKDGYFGYYDGFDRHTASLVIENHDNSDRYRGIGVKTGVVEFNKYEVDVLGNYHKVNLGGN

SEQ ID NO: 158 - protein, 1065 aa, Clostridium perfringens
  source 1..1065: note = D str. JGS1721
MNKDINYALGLDIGITSVGWAVINLDLNRIEDLGVRIFNAAENLKDGSSLALPRRLARGRRRLLRRKAYRVERVRKLILKNNILTKEELEGLFKNKEVIDVWEARVKGLDYKLSREEWAKILINFCKRRGFKSNRKNEAKDKEAGQILSSISYNIEKMKETNSRTIGEYIYNEVKNSEDSYAPLRNKFGEYKMCVSRDVIREEIHTLFEKQRELGNNFASDEIEDKYFEIFNSQRPFSNFEDLEKLVGFCTFERKKHKRAPKHCISSEEFTLYEGINKLSIIKDGEKRKLSEEERTLVVNEAFNKKEIKYTTLRKLLGLSEEELFSTLTYSIDKDISKTENTKFVSLKGYHEIKRAIEKGVSKKAWQDIENNRNLLNDIAYVLTLGKTDDEIEKQLRLRNVPEELFESLLDMSFNKFNNLSIYALEKILPFMKEGYQYNEACEKAGYNFKAIYEGVRTKKLPVIEIDEIVNPVVNRALAQTRKVINSVIDKYGSPVRINIELARDLAKNFKDRKLIEKEQKENRANLDKIRENLRELMDKEPTVVEVLKYRLWEQQRGECAYTQSQIPLERLFSPGYCEIDHIIPFSRSFDDSLSNKILVLGSENQRKGNRTPYEYFGEDSERWNSFEIWVKGSYLNYKKKANLLKKKFSEEEQRDWKARNLQDTKYICRYISNFVNNRLEFKESENKQKVITVNGRATAYLRSRWGLNKVREDGDKHHALDAAVVGVTTQGMVQKISKYSKAHELYTVRKNDEFVDVETGECVDVDEYKEIRKDILPRPWRGFSEELKLRLSDNPLEELKKSPIETYNEEFIKENVKPIFVSRVPFRKISGKLFKETIYSERAFKDGYFVSKKSLVDLKRGDLDNFYNYECDKKLYDAISERMKEFNYNGKKAFESPFRKPTKSGKEGPVVRSVKIKSAVPFKDGIPMNEGLVAKEGMVRIDIYEKEGKYFVVPVYRYQLAKGIVPKRAAIAKKDELKWPIMDQTYNFKFSIYKNDLIEVKYDKKGVYFGYYDGFDRNSASLTIEKHDNSERYRSIGLKVGVLEINKYEVDVLGNYHKVKLGGN

SEQ ID NO: 159 - protein, 1116 aa, Clostridium spiroforme
  source 1..1116: note = DSM 1552
MVEFLLKEMKIMGRLVLGLDIGITSVGYGVIDIDKNEFVDYGVRLFKEGTAINNEERRSKRGARRLKRRKTNRIADMKKLLERNGLIDEQYTALNNPYEIRKKGLKNKLSNYELATAILHITKNRGTCLESNADETQDEESTKNILSKNALELKDKYICEIQLARLEESGKIRGINNNFKTEDYLKELSKILENQDLEKETIDKIKEIVARRRRYDQGPGSEKSPTPYGSYRMENGELVHVNLIDMMRGKCSVFPDQLRAPQQSYSAELFNLLNDLNNLKINGEKLSSTEKQKIIDFVNEKGGITVKQLLKLIDVGITEISGFRIDKNEKPLITEFKGYKKVLKVFKNYNQESLLNDKSIVDTIMDINTKIKSIDERSDQLKQVLPSLDTSIINDLASIKGVSGYHSLSLKALNLINNEMLKTEMNQMQVLHQLDIFDKNRVSLKGQRQIYADDNAILSPVAKRAHRETFKVINKLRSIYGEFDSIVIETTRDKNTQDQKKRIKNNQKNYEERNTEVNNFLKEAGYNPENINAKTKMKIRLYIEQDAKSAYTLQDINLKELIEDEKAYEIDHIIPISISLDDSFNNKVLTTHDENQEKGNLTPISAFLKGKFHNGNLNTYKVFIQNNKNLNRKKKEYLLCEDDITRYEVVQNFINRNLVDTSYACRTVMNTLVHYFKDNEINTKVHTIKGQATSTFRKRIGLIKDREEDYFHHAIDALIVASLKKMNLINSYLMKVDFNEMYDEETGEIFNVLPDNSYLDEKYISFVSNLKNIYEESNKYIRGVMIKEKMTYPLIKVSHKIDTKPNRKISDDTIYSTRNVDNQDMLVERIKNIYDPKENAANTLINDIINDNTDKYIMYHKDPQTFDKIKAIVLNHFNEFKTDKNCYIVTKEGLYKLKGTSPLALYYEEFGPITKYAKKNNGPTIHSMKFYSEKLGNHLSITHKYSTVNKKVITKQISPYRTDFYQSPEGKYKFVTVRYKDVAYNAKKDKYIIDHSWYREQKKLKKIADEWIFVCSVHRDELIGIMKADGQKRIFDSSTESDGETLYHDAKTYEILKFTATNNDITGRFEVKPIYCYCKKQLMVSIGTCRKIQKFATDVLGNLYIVKDNVLKLEFK

SEQ ID NO: 160 - protein, 1338 aa, Coprococcus catus
  source 1..1338: note = GD/7
MKQEYFLGLDMGTGSLGWAVTDSTYQVMRKHGKALWGTRLFESASTAEERRMFRTARRRLDRRNWRIQVLQEIFSEEISKVDPGFFLRMKESKYYPEDKRDAEGNCPELPYALFVDDNYTDKNYHKDYPTIYHLRKMLMETTEIPDIRLVYLVLHHMMKHRGHFLLSGDISQIKEFKSTFEQLIQNIQDEELEWHISLDDAAIQFVEHVLKDRNLTRSTKKSRLIKQLNAKSACEKAILNLLSGGTVKLSDIFNNKELDESERPKVSFADSGYDDYIGIVEAELAEQYYIIASAKAVYDWSVLVEILGNSVSISEAKIKVYQKHQADLKTLKKIVRQYMTKEDYKRVFVDTEEKLNNYSAYIGMTKKNGKKVDLKSKQCTQADFYDFLKKNVIKVIDHKEITQEIESEIEKENFLPKQVTKDNGVIPYQVHDYELKKILDNLGTRMPFIKENAEKIQQLFEFRIPYYVGPLNRVDDGKDGKFTWSVRKSDARIYPWNFTEVIDVEASAEKFIRRMTNKCTYLVGEDVLPKDSLVYSKFMVLNELNNLRLNGEKISVELKQRIYEELFCKYRKVTRKKLERYLVIEGIAKKGVEITGIDGDFKASLTAYHDFKERLTDVQLSQRAKEAIVLNVVLFGDDKKLLKQRLSKMYPNLTTGQLKGICSLSYQGWGRLSKTFLEEITVPAPGTGEVWNIMTALWQTNDNLMQLLSRNYGFTNEVEEFNTLKKETDLSYKTVDELYVSPAVKRQIWQTLKVVKEIQKVMGNAPKRVFVEMAREKQEGKRSDSRKKQLVELYRACKNEERDWITELNAQSDQQLRSDKLFLYYIQKGRCMYSGETIQLDELWDNTKYDIDHIYPQSKTMDDSLNNRVLVKKNYNAIKSDTYPLSLDIQKKMMSFWKMLQQQGFITKEKYVRLVRSDELSADELAGFIERQIVETRQSTKAVATILKEALPDTEIVYVKAGNVSNFRQTYELLKVREMNDLHHAKDAYLNIVVGNAYFVKFTKNAAWFIRNNPGRSYNLKRMFEFDIERSGEIAWKAGNKGSIVTVKKVMQKNNILVTRKAYEVKGGLFDQQIMKKGKGQVPIKGNDERLADIEKYGGYNKAAGTYFMLVKSLDKKGKEIRTIEFVPLYLKNQIEINHESAIQYLAQERGLNSPEILLSKIKIDTLFKVDGFKMWLSGRTGNQLIFKGANQLILSHQEAAILKGVVKYVNRKNENKDAKLSERDGMTEEKLLQLYDTFLDKLSNTVYSIRLSAQIKTLTEKRAKFIGLSNEDQCIVLNEILHMFQCQSGSANLKLIGGPGSAGILVMNNNITACKQISVINQSPTGIYEKEIDLIKL

SEQ ID NO: 161 - protein, 1384 aa, Coriobacterium glomerans
MKLRGIEDDYSIGLDMGTSSVGWAVTDERGTLAHFKRKPTWGSRLFREAQTAAVARMPRGQRRRYVRRRWRLDLLQKLFEQQMEQADPDFFIRLRQSRLLRDDRAEEHADYRWPLFNDCKFTERDYYQRFPTIYHVRSWLMETDEQADIRLIYLALHNIVKHRGNFLREGQSLSAKSARPDEALNHLRETLRVWSSERGFECSIADNGSILAMLTHPDLSPSDRRKKIAPLFDVKSDDAAADKKLGIALAGAVIGLKTEFKNIFGDFPCEDSSIYLSNDEAVDAVRSACPDDCAELFDRLCEVYSAYVLQGLLSYAPGQTISANMVEKYRRYGEDLALLKKLVKIYAPDQYRMFFSGATYPGTGIYDAAQARGYTKYNLGPKKSEYKPSESMQYDDFRKAVEKLFAKTDARADERYRMMMDRFDKQQFLRRLKTSDNGSIYHQLHLEELKAIVENQGRFYPFLKRDADKLVSLVSFRIPYYVGPLSTRNARTDQHGENRFAWSERKPGMQDEPIFPWNWESIIDRSKSAEKFILRMTGMCTYLQQEPVLPKSSLLYEEFCVLNELNGAHWSIDGDDEHRFDAADREGIIEELFRRKRTVSYGDVAGWMERERNQIGAHVCGGQGEKGFESKLGSYIFFCKDVFKVERLEQSDYPMIERIILWNTLFEDRKILSQRLKEEYGSRLSAEQIKTICKKRFTGWGRLSEKFLTGITVQVDEDSVSIMDVLREGCPVSGKRGRAMVMMEILRDEELGFQKKVDDFNRAFFAENAQALGVNELPGSPAVRRSLNQSIRIVDEIASIAGKAPANIFIEVTRDEDPKKKGRRTKRRYNDLKDALEAFKKEDPELWRELCETAPNDMDERLSLYFMQRGKCLYSGRAIDIHQLSNAGIYEVDHIIPRTYVKDDSLENKALVYREENQRKTDMLLIDPEIRRRMSGYWRMLHEAKLIGDKKFRNLLRSRIDDKALKGFIARQLVETGQMVKLVRSLLEARYPETNIISVKASISHDLRTAAELVKCREANDFHHAHDAFLACRVGLFIQKRHPCVYENPIGLSQVVRNYVRQQADIFKRCRTIPGSSGFIVNSFMTSGFDKETGEIFKDDWDAEAEVEGIRRSLNFRQCFISRMPFEDHGVFWDATIYSPRAKKTAALPLKQGLNPSRYGSFSREQFAYFFIYKARNPRKEQTLFEFAQVPVRLSAQIRQDENALERYARELAKDQGLEFIRIERSKILKNQLIEIDGDRLCITGKEEVRNACELAFAQDEMRVIRMLVSEKPVSRECVISLFNRILLHGDQASRRLSKQLKLALLSEAFSEASDNVQRNVVLGLIAIFNGSTNMVNLSDIGGSKFAGNVRIKYKKELASPKVNVHLIDQSVTGMFERRTKIGL

SEQ ID NO: 162 - protein, 1099 aa, Corynebacterium accolens
  source 1..1099: note = ATCC 49725
MSLSYRVGIDVGTYSLGCTAIEVDDNDQPVNILSSVSLIHDSGLDPDQQKRAVTRLASSGVARRTRRLYRRRRRRMINLEKFLTSQGWETRPFEHYSDPYLPWNARVALVNGYISDDAQRGMYLSIAFRHIANHRGWRNPYWKVSSLYSPDKPSDAFEQIRKELEESTGHKIPETVTVGQLISFAQFGKDRLRGGGKKKDEKKPQEQVNQAVISARLHQIDHAREINEICRVQKIDDALRKQILDLVFAAESPKGAQIGRVGKDPLQPKLPRALKASDAFQQYRIVALAGNLRIYRDGVSTPLDRDEKLIVFNYLINLSHKEEPSWLKVAEVLNIDRGQLHGTATMTDDGERAGAAPPVHDTNRTILGCKIKPLVHWWEGANDDERAAMLKALSNSEVEDFDSPAGAQTQAFFANLDESEQEKLDSLHLPIGRAAYSEDTLMRLTSRMLDENLDLYEARLAEFDIPKDWAPPAPRIGEPVGNPAVDRVLKGVARWLEAAADEWGAPKSVVIEHVRDGFISKSKANEIDRANNARHKRNRELFKQMQENLGIDGKLRSSDLWRYQSVQRQNCQCAYCGSPITYTTCEMDHIVPRAGEGSTNTRDNLVATCHRCNLAKKNIPFAVWAAQTNIPGVSVKEALDRTRHWSEDSGMTSKDFKKFRKNVCDRLKRTVVDEPLDARSMESVAWMANELRGRVAQRFQEENTVVNVYRGELTAEARRAAGISDKLRFIDGTGKSRLDRRHHAVDAAVVAFTQNYVAETLAIRSNKKREAQLLQAAEQWKEFTGSDAEHRAAWNAWLPKMQKLAVLLQKALDEDRIAVTSNLRLRLGNGRAHEDSIGELKTIRVGDAISVTDIDRASSEALWCALTREPDFDENNGLPENPDRRIRIHGTWYDAEDDIEVFPVGAGAIKVRGGYAELSRFHHARIYKIPGKKAPVYCMLRVYNADLIRHRHEDLFSVEIKPQTMSVRQAEPKLRKALAENTAEYLGWLVTDDELVIDTSNFNTGQIAEMQSELGQVRRWRLDGFYSPSTLRLRPLQMSAEGLREDTSIGAKKIIDRPGWLPAINKLFGEGHVTVVRRDALGRARLTSNAHLPISWKAE

SEQ ID NO: 163 - protein, 1099 aa, Corynebacterium accolens
  source 1..1099: note = ATCC 49726
MSLLYRVGIDVGTYSLGCTAIEVDDNDQPVSILSSVSLIHDSGLDPDQQKRAVTRLASSGVARRTRRLYRRRRRRMVKLENFLTAQGWETLPFERYSDPYLPWHARVALVNGYISDDTQRGQYLSIAFRHIANHRGWRNPYWKVSSLYSPDKPSDAFEQIRKELEASTGRQIPETATVGQLISFAQFGKDRLRGGGKQKDKKKPQEQVNQAVISARLHQIDHAREINEICRVQKIDDTLRKQILDLVFAAESPKGAQKGRVGKDPLQPKLFRALKASDAFQQYRIAALTGNLRIYRNGVTVPLDRDEKLIVFNYLVNLPKKEEPSWLKIAEILNIDRGQLRGTATMTDDGERAGATPPVHDTNRTILDSKVKPLAHWWENASDDERAAMLKSLSNSEVEDFDSPAGAQVQAFFADLDETEQEKLDSLHLPMGRAAYSEDTLMRLTNRMLDENLDLYEARLAEFGIPKDWAPPAPRIGEPVGNPAVDRVLKGVARWLEAAADEWGAPKSVVIEHVRDGFVSKSKAIEIDRANNNRHKRNRELFQKMQENLGIEGKVRSSDLWRYQSVQRQNCQCAYCGSPITYTTCEMDHIVPRAGEGSTNTRDNLVATCHRCNLAKKNIPFAVWAEKSTIPGVSVKEALDRTRHWSEDSGMSKKDFQKFRKNVCERLNRTVVDEPLDARSMESVAWMANELRGRVAQRFQEENTTVNVYRGALTAEARRAAGITDKLRFIDGTGKSRLDRRHHAVDAAVVAFIHNYVAETLAIRSNKKREAQLLQGTSQWKEFTGSDDKHRAVWNAWIPKMQKLAVLLQIALDEDRIVVTSNLRLRLGNGRAHEDTISELKTIRVGDAISVTDIDRASSEALWCALTREPDFDEKDGLPENPNRRIRVHGTWYDAEDEIEVFPVGAGAIKVRGGYAKLSRFHHARVYKIPGKKAPIYCMLRVYNTDLVQHRHEDLFSVELKPQTMSVRQAEPKLRKALAENTAEYLGWLVTDDELIIDTSTFRTGLIEEMQSEFGLVRRWRLDGFDSPSLLTLRPLHMSAEGLPDDCALGSRKIIDTKGWRVSINKVFNAGNTTVVRRDALGRARLTSNAHLPISWKEE

SEQ ID NO: 164 - protein, 1084 aa, Corynebacterium diphtheriae
MKYHVGIDVGTFSVGLAAIEVDDAGMPIKTLSLVSHIHDSGLDPDKIKSAVTRLASSGIARRTRRLYRRKRRRLQQLDKFIQRQGWPVIELEDYSDPLYPWKVRAELAASYIADEKERGEKLSVALRHIARHRGWRNPYAKVSSLYLPDEPSDAFKAIREEIKRASGQPVPETATVGQMVTLCELGTLKLRGEGGVLSARLQQSDHAREIQEICRMQEIGQELYRKIIDVVFAAESPKGSASSRVGKDPLQPGKNRALKASDAFQRYRIAALIGNLRVRVDGEKRILSVEEKNLVFDHLVNLAPKKEPEWVTIAEILGIDRGQLIGTATMTDDGERAGARPPTHDTNRSIVNSRIAPLVDWWKTASALEQHAMVKALSNAEVDDFDSPEGAKVQAFFADLDDDVHAKLDSLHLPVGRAAYSEDTLVRLTRRMLADGVDLYTARLQEFGIEPSWTPPAPRIGEPVGNPAVDRVLKTVSRWLKSATKTWGAPERVIIEHVREGFVTEKRAREMDGDMRRRAARNAKLFQEMQEKLNVQGKPSRADLWRYQSVQRQNCQCAYCGSPITFSNSEMDHIVPRAGQGSTNTRENLVAVCHRCNQSKGNTPFAIWAKNTSIEGVSVKEAVERTRHWVTDTGMRSTDFKKFTKAVVERFQRATMDEEIDARSMESVAWMANELRSRVAQHFASHGTTVRVYRGSLTAEARRASGISGKLEFLDGVGKSRLDRRHHAIDAAVIAFTSDYVAETLAVRSNLKQSQAHRQEAPQWREFTGKDAEHRAAWRVWCQKMEKLSALLTEDLRDDRVVVMSNVRLRLGNGSAHEETIGKLSKVKLGSQLSVSDIDKASSEALWCALTREPDFDPKDGLPANPERHIRVNGTHVYAGDNIGLFPVSAGSIALRGGYAELGSSFHHARVYKITSGKKPAFAMLRVYTIDLLPYRNQDLFSVELKPQTMSMRQAEKKLRDALATGNAEYLGWLVVDDELVVDTSKIATDQVKAVEAELGTIRRWRVDGFFGDTRLRLRPLQMSKEGIKKESAPELSKIIDRPGWLPAVNKLFSEGNVTVVRRDSLGRVRLESTAHLPVTWKVQ

SEQ ID NO: 165 - protein, 1084 aa, Corynebacterium diphtheriae
MKYHVGIDVGTFSVGLAAIEVDDAGMPIKTLSLVSHIHDSGLDPDKMKSAVTRLASSGIARRTRRLYRRKRRRLQQLDKFIQRQGWPVIELEDYSDPLYPWKVRAELAASYIADEKERGEKLSVALRHIARHRGWRNPYAKVSSLYLPDEPSDAFKSIREEIKRASGQPVPETATVGQMVTLCELGTLKLRGEGGVLSARLQQSDHAREIQEICRMQEIGQELYRKIIDVVFAAESPKGSASSRVGKDPLQPGKNRALKASDAFQRYRIAALIGNLRVRVDGEKRILSVEEKNLVFDHLVNLAPKKEPEWVTIAEILGIDRGQLIGTATMTDDGERAGARPPTHDTNRSIVNSRIAPLVDWWKTASALEQHAMVKALSNAEVDDFDSPEGAKVQAFFADLDDDVHAKLDSLHLPVGRAAYSEDTLVRLTRRMLADGVDLYTARLQEFGIEPSWTPPAPRIGEPVGNPAVDRVLKTVSRWLESATKTWGAPERVIIEHVREGFVTEKRAREMDGDMRRRAARNAKLFQEMQEKLNVQGKPSRADLWRYQSVQRQNCQCAYCGSPITFSNSEMDHIVPRAGQGSTNTRENLVAVCHRCNQSKGNTPFAIWAKNTSIEGVSVKEAVERTRHWVTDTGMRSTDFKKFTKAVVERFQRATMDEEIDARSMESVAWMANELRSRVAQHFASHGTTVRVYRGSLTAEARRASGISGKLEFLDGVGKSRLDRRHHAIDAAVIAFTSDYVAETLAVRSNLKQSQAHRQEAPQWREFTGKDAEHRAAWRVWCQKMEKLSALLTEDLRDDRVVVMSNVRLRLGNGSAHEETIGKLSKVKLGSQLSVSDIDKASSEALWCALTREPDFDPKDGLPANPERHIRVNGTHVYAGDNIGLFPVSAGSIALRGGYAELGSSFHHARVYKITSGKKPAFAMLRVYTIDLLPYRNQDLFSVELKPQTMSMRQAEKKLRDALATGNAEYLGWLVVDDELVVDTSKIATDQVKAVEAELGTIRRWRVDGFFGDTRLRLRPLQMSKEGIKKESAPELSKIIDRPGWLPAVNKLFSEGNVTVVRRDSLGRVRLESTAHLPVTWKVQ

SEQ ID NO: 166 - protein, 1084 aa, Corynebacterium diphtheriae
MKYHVGIDVGTFSVGLAAIEVDDAGMPIKTLSLVSHIHDSRLDPDKIKSAVTRLASSGIARRTRRLYRRKRRRLQQLDKFIQRQGWPVIELEDYSDPLYPWKVRAELAASYIADEKERGEKLSVALRHIARHRGWRNPYAKVSSLYLPDEPSDAFKAIREEIKRASGQPVPETATVGQMVTLCELGTLKLRGEGGVLSARLQQSDHAREIQEICRMQEIGQELYRKIIDVVFAAESPKGSASSRVGKDPLQPGKNRALKASDAFQRYRIAALIGNLRVRVDGEKRILSVEEKNLVFDHLVNLAPKKEPEWVTIAEILGIDRGQLIGTATMTDDGERAGARPPTHDTNRSIVNSRIAPLVDWWKTASALEQHAMVKALSNAEVDDFDSPEGAKVQAFFADLDDDVHAKLDSLHLPVGRAAYSEDTLVRLTRRMLADGVDLYTARLQEFGIEPSWTPPAPRIGEPVGNPAVDRVLKTVSRWLESATKTWGAPERVIIEHVREGFVTEKRAREMDGDMRRRAARNAKLFQEMQEKLNIQGKPSRADLWRYQSVQRQNCQCAYCGSPITFSNSEMDHIVPRAGQGSTNTRENLVAVCHRCNQSKGNTPFAIWAKNTSIEGVSVKEAVERTRHWVTDTGMRSTDFKKFTKAVVERFQRVTMDEEIDARSMESVAWMANELRSRVAQHFASRGTTVRVYRGSLTAEARRASGISGKLEFLDGVGKSRLDRRHHAIDAAVIAFTSDYVAETLAVRSNLKQSQAHRQEAPQWREFTGKDAEHRAAWRVWCQKMEKLSALLTEDLRDDRVVVMSNVRLRLGNGSAHEETIGKLSKVKLGSQLSVSDIDKASSEALWCALTREPDFDPKDGLPANPERHIRVNGTHVYAGDNIGLFPVSAGSIALRGGYAELGSSFHHARVYKITSGKKPAFAMLRVYTIDLLPYRNQDLFSVELKPQTMSMRQAEKKLRDALATGNAEYLGWLVVDDELVVDTSKIATDQVKAVEAELGTIRRWRVDGFFGDTRLRLRPLQMSKEGIKKESAPELSKIIDRPGWLPAVNKLFSEGNVTVVRRDSLGRVRLESTAHLPVTWKVQ

SEQ ID NO: 167 - protein, 1084 aa, Corynebacterium diphtheriae
  source 1..1084: note = bv. intermedius str. NCTC 5011
MKYHVGIDVGTFSVGLAAIEVDDAGMPIKTLSLVSHIHDSGLDPDEIKSAVTRLASSGIARRTRRLYRRKRRRLQQLDKFIQRQGWPVIELEDYSDPLYPWKVRAELAASYIADEKERGEKLSVALRHIARHRGWRNPYAKVSSLYLPDGPSDAFKAIREEIKRASGQPVPETATVGQMVTLCELGTLKLRGEGGVLSARLQQSDHAREIQEICRMQEIGQELYRKIIDVVFAAESPKGSASSRVGKDPLQPGKNRALKASDAFQRYRIAALIGNLRVRVDGEKRILSVEEKNLVFDHLVNLAPKKEPEWVTIAEILGIDRGQLIGTATMTDDGERAGARPPTHDTNRSIVNSRIAPLVDWWKTASALEQHAMVKALSNAEVDDFDSPEGAKVQAFFADLDDDVHAKLDSLHLPVGRAAYSEDTLVRLTRRMLADGVDLYTARLQEFGIEPSWTPPAPRIGEPVGNPAVDRVLKTVSRWLESATKTWGAPERVIIEHVREGFVTEKRAREMDGDMQRRAARNAKLFQEMQEKLNVQGKPSRADLWRYQSVQRQNCQCAYCGSPITFSNSEMDHIVPRAGQGSTNTRENLVAVCHRCNQSKGNTPFAIWAKNTSIEGVSVKEAVERTRHWVTDTGMRSPDFKKFTKAVVERFQRATMDEEIDARSMESVAWMANELRSRVAQHFASHGTTVRVYRGSLTAEARRASGISGKLKFFDGVGKSRLDRRHHAIDAAVIAFTSDYVAETLAVRSNLKQSQAHRQEAPQWREFTGKDAEHRAAWRVWCQKMEKLSALLTEDLRDDRVVVMSNVRLRLGNGSAHKETIGKLSKVKLGSQLSVSDIDKASSEALWCALTREPDFDPKEGLPANPERHIRVNGTHVYAGDNIGLFPVSAGSIALRGGYAELGSSFHHARVYKITSGKKPAFAMLRVYTIDLLPYRNQDLFSVELKPQTMSMRQAEKKLRDALATGNAEYLGWLVVDDELVVDTSKIATDQVKAVEAELGTIRRWRVDGFFSPSKLRLRPLQMSKEGIKKESAPELSKIIDRPGWLPAVNKLFSDGNVTVVRRDSLGRVRLESTAHLPVTWKVQ

SEQ ID NO: 168 - protein, 1084 aa, Corynebacterium diphtheriae
MKYHVGIDVGTFSVGLAAIEVDDAGMPIKTLSLVSHIHDSGLDPDKIKSAVTRLASSGIARRTRRLYRRKRRRLQQLDKFIQRQGWPVIELEDYSDPLYPWKVRAELAASYIADEKERGEKLSVALRHIARHRGWRNPYAKVSSLYLPDEPSDAFKAIREEIKRASGQPVPETATVGQMVTLCELGTLKLRGEGGVLSARLQQSDHAREIQEICRMQEIGQELYRKIIDVVFAAESPKGSASSRVGKDPLQPGKNRALKASDAFQRYRIAALIGNLRVRVDGEKRILSVEEKNLVFDHLVNLAPKKEPEWVTIAEILGIDRGQLIGTATMTDDGERAGARPPTHDTNRSIVNSRIAPLVDWWKTASALEQHAMVKALSNAEVDDFDSPEGAKVQAFFADLDDDVHAKLDSLHLPVGRAAYSEDTLVRLTRRMLADGVDLYTARLQEFGIEPSWTPPAPRIGEPVGNPAVDRVLKTVSRWLESATKTWGAPERVIIEHVREGFVTEKRAREMDGDMRRRAARNAKLFQEMQEKLNVQGKPSRADLWRYQSVQRQNCQCAYCGSPITFSNSEMDHIVPRAGQGSTNTRENLVAVCHRCNQSKGNTPFAIWAKNTSIEGVSVKEAVERTRHWVTDTGMRSTDFKKFTKAVVERFQRATMDEEIDARSMESVAWMANELRSRVAQHFASHGTTVRVYRGSLTAEARRASGISGKLEFLDGVGKSRLDRRHHAIDAAVIAFTSDYVAETLAVRSNLKQSQAHRQEAPQWREFTGKDAEHRAAWRVWCQKMEKLSALLTEDLRDDRVVVMSNVRLRLGNGSAHEETIGKLSKVKLGSQLSVSDIDKASSEALWCALTREPDFDPKDGLPANPERHIRVNGTHVYAGDNIGLFPVSAGSIALRGGYAELGSSFHHARVYKITSGKKPAFAMLRVYTIDLLPYRNQDLFSVELKPQTMSMRQAEKKLRDALATGNAEYLGWLVVDDELVVDTSKIATDQVKAVEAELGTIRRWRVDGFFGDTRLRLRPLQMSKEGIKKESAPELSKIIDRPGWLPAVNKLFSEGNVTVVRRDSLGRVRLESTAHLPVTWKVQ

SEQ ID NO: 169 - protein, 1084 aa, Corynebacterium diphtheriae
MKYHVGIDVGTFSVGLAAIEVDDAGMPIKTLSLVSHIHDSGLDPDEIKSAVTRLASSGIARRTRRLYRRKRRRLQQLDKFIQRQGWPVIELEDYSDPLYPWKVRAELAASYIADEKERGEKLSVALRHIARHRGWRNPYAKVSSLYLPDGPSDAFKAIREEIKRASGQPVPETATVGQMVTLCELGTLKLRGEGGVLSARLQQSDHAREIQEICRMQEIGQELYRKIIDVVFAAESPKGSASSRVGKDPLQPGKNRALKASDAFQRYRIAALIGNLRVWVDGEKRILSVEEKNLVFDHLVNLTPKKEPEWVTIAEILGIDRGQLIGTATMTDDGERAGARPPTHDTNRSIVNSRIAPLVDWWKTASALEQHAMVKALSNAEVDDFDSPERAKVQAFFADLDDDVHAKLDSLHLPVGRAAYSEDTLVRLTRRMLSDGVDLYTARLQEFGIEPSWTPPTPRIGEPVGNPAVDRVLKTVSRWLESATKTWGAPERVIIEHVREGFVTEKRAREMDGDMRRRAARNAKLFQEMQEKLNVQGKPSRADLWRYQSVQRQNCQCAYCGSPITFSNSEMDHIVPRAGQGSTNTRENLVAVCHRCNQSKGNTPFAIWAKNTSIEGVSVKEAVERTRHWVTDTGMRSTDFKKFTKAVVERFQRATMDEEIDARSMESVAWMANELRSRVAQHFASHGTTVRVYRGSLTAEARRASGISGKLEFLDGVGKSRLDRRHHAIDAAVIAFTSDYVAETLAVRSNLKQSQAHRQEAPQWREFTGKDAEHRATWRVWCQKMEKLSALLTEDLRDDRVVVMSNVRLRLGNGSAHEETIGKLSKVKLGSQLSVSDIDKASSEALWCALTREPDFDPKDGLPANPERHIRVNGTHVYAGDNIGLFPVSAGSIALRGGYAELGSSFHHARVYKITSGKKPAFAMLRVYTIDLLPYRNQDLFSVELKPQTMSMRQAEKKLRDALATGNAEYLGWLVVDDELVVDTSKIATDQVKAVEAELGTIRRWRVDGFFGDTRLRLRPLQMSKEGIKKESAPELSKIIDRPGWLPAVNKLFSEGNVTVVRRDSLGRVRLESTAHLPVTWKVQ

SEQ ID NO: 170 - protein, 1084 aa, Corynebacterium diphtheriae
MKYHVGIDVGTFSVGLAAIEVDDAGMPIKTLSLVSHIHDSGLDPDEIKSAVTRLASSGIARRTRRLYRRKRRRLQQLDKFIQRQGWPVIELEDYSDPLYPWKVRAELAASYIADEKERGEKLSVALRHIARHRGWRNPYAKVSSLYLPDGPSDAFKAIREEIKRASGQPVPETATVGQMVTLCELGTLKLRGEGGVLSARLQQSDYAREIQEICRMQEIGQELYRKIIDVVFAAESPKGSASSRVGKDPLQPGKNRALKASDAFQRYRIAALIGNLRVRVDGEKRILSVEEKNLVFDHLVNLTPKKEPEWVTIAEILGIDRGQLIGTATMTDDGERAGARPPTHDTNRSIVNSRIAPLVDWWKTASALEQHAMVKALSNAEVDDFDSPEGAKVQAFFADLDDDVHAKLDSLHLPVGRAAYSEDTLVRLTRRMLSDGVDLYTARLQEFGIEPSWTPPTPRIGEPVGNPAVDRVLKTVSRWLESATKTWGAPERVIIEHVREGFVTEKRAREMDGDMRRRAARNAKLFQEMQEKLNVQGKPSRADLWRYQSVQRQNCQCAYCGSPITFSNSEMDHIVPRAGQGSTNTRENLVAVCHRCNQSKGNTPFAIWAKNTSIEGVSVKEAVERTRHWVTDTGMRSTDFKKFTKAVVERFQRATMDEEIDARSMESVAWMANELRSRVAQHFASHGTTVRVYRGSLTAEARRASGISGKLKFFDGVGKSRLDRRHHAIDAAVIAFTSDYVAETLAVRSNLKQSQAHRQEAPQWREFTGKDAEHRAAWRVWCQKMEKLSALLTEDLRDDRVVVMSNVRLRLGNGSAHKETIGKLSKVKLSSQLSVSDIDKASSEALWCALTREPGFDPKEGLPANPERHIRVNGTHVYAGDNIGLFPVSAGSIALRGGYAELGSSFHHARVYKITSGKKPAFAMLRVYTIDLLPYRNQDLFSVELKPQTMSMRQAEKKLRDALATGNAEYLGWLVVDDELVVDTSKIATDQVKAVEAELGTIRRWRVDGFFSPSKLRLRPLQMSKEGIKKESAPELSKIIDRPGWLPAVNKLFSDGNVTVVRRDSLGRVRLESTAHLPVTWKVQ

SEQ ID NO: 171 - protein, 1084 aa, Corynebacterium diphtheriae
MKYHVGIDVGTFSVGLAAIEVDDAGMPIKTLSLVSHIHDSGLDPDKMKSAVTRLASSGIARRTRRLYRRKRRRLQQLDKFIQRQGWPVIELEDYSDPLYPWKVRAELAASYIADEKERGEKLSVALRHIARHRGWRNPYAKVSSLYLPDEPSDAFKSIREEIKRASGQPVPETATVGQMVTLCELGTLKLRGEGGVLSARLQQSDHAREIQEICRMQEIGQELYRKIIDVVFAAESPKGSASSRVGKDPLQPGKNRALKASDSFQRYRIAALISNLRVRVDGEKRILSVEEKNLVFDHLVNLAPKKEPEWVTIAEILGIDRGQLIGTATMTDDGERAGARPPTHDTNRSIVNSRIAPLVDWWKTASALEQHAMVKALSNAEVDDFDSPEGAKVQAFFADLDDDVHAKLDSLHLPVGRAAYSEDTLVRLTRRMLADGVDLYTARLQEFGIEPSWTPPAPRIGEPVGNPAVDRVLKTVSRWLESATKTWGAPERVIIEHVRDGFVTEKRAREMDGDMRRRAARNAKLFQEMQEKLNVQGKPSRADLWRYQSVQRQNCQCAYCGSPITFSNSEMDHIVPRAGQGSTNTRENLVAVCHRCNQSKGNTPFAIWAKNTSIEGVSVKEAVERTRHWVTDTGMRSTDFKKFTKAVVERFQRATMDEEIDARSMESVAWMANELRSRVAQHFASHGTTVRVYRGSLTAEARRASGISGKLEFLDGVGKSRLDRRHHAIDAAVIAFTSDYVAETLAVRSNLKQSQAHRQEAPQWREFTGKDAEHRAAWRVWCQKMEKLSALLTEDLRDDRVVVMSNVRLRLGNGSAHEETIGKLSKVKLGSQLSVSDIDKASSEALWCALTREPDFDPKDGLPANPERHIRVNGTHVYAGDNIGLFPVSAGSIALRGGYAELGSSFHHARVYKITSGKKPAFAMLRVYTIDLLPYRNQDLFSVELKPQTMSMRQAEKKLRDALATGNAEYLGWLVVDDELVVDTSKIATDQVKAVEAELGTIRRWRVDGFFGDTRLRLRPLQMSKEGIKKELAPELSKIIDRPGWLPAVNKLFSEGNVTVVRRDSLGRVRLESTAHLPVTWKVQ

SEQ ID NO: 172 - protein, 1089 aa, Corynebacterium matruchotii
  source 1..1089: note = ATCC 14266
MNSANVNYRVGIDVGSYSLGMAAIAIDDDGKPTEILSAISLIHDSGVDPDSAKSAATRLATSGIARRTRRLYRRKRKRLAKLDKFISSQGWPLKEFEKYEDPFYPWRVRAELATTAITDQQELGEKLSIALRHIARHRGWRNPYSKVTALYTVTEPSDAFLAMQEECAKQLGRTIPETITVGQLVTGMNLGKTRLRGENSLLAARPRQSDNANEIHTIAKVQGLSNELVRQIIDHVFAAESPKGSAAEQVGKDPLQPTKKRALKASDAFQQYRIAALIGNLRIRGGKGNRRLTTEETRLVFDYLRSLPAKQEPTWQLVAEQLKIDRGNLVGTAIMTDDGERAGAKPPVHDTNRIMENTKIKPLATWWKSADADARAAMVKALSNAEVDDFDSQAGAQVQEFFFGISDEDQEKLDGLHLPIGRAAYSEDTLDRLTKRMIGEGMDLYEARQAEFKISNDWAPPAPEIGERVGNPAVDRVLKATARWLNAAERQWGAPKSVNIEHVRAAFMSESSARELDRDNQQRAKRNVKVVAEMQEKLGIEGRPSRADVWRFQSIQRQNGKCAYCGAEISFKNSEMDHIIPQAGEGSTNTRDNLVAVCRECNSSKSNIAFAVWAENTSRPGVSVQKAIERTHHWVTDSGLRKPEFDKFRKQVCDRLRRKATDEPIDARSLESVAWMANELRSRIAQKFKDGDTKVRVYKGALTAEARRASGISGKLEFVDGKGKSRLDRRHHAVDAAVVAFTSNYVAETLALRSNMKFDQELRRKAPQWREFTGSDHVHQVEWTKWKYRMQALAELLNNALVQDRIVVMHNLRLRLGNGAAHEDTIGKLTRLKVGDAISTTDIDRASSEALWCALTRDPDYDPKTGLPENPNRTIRIHGTHLTASDEITVFPVAAASIPIRDGFAKLGSNYHHVRLFRVPSGKKYKYCLMQVYTVDLLKFRKEDLFTVELKPQTISVRTCEALLRKALANGTAEYLGWLVSDDELLIDTSSFDTPGIVKLREEYGPVNRWRLAGLTSVTRLNLRPLYLSKEGLKPNVNPEIKKIIDNRSWIITVNKLFSSGHVKIIRRDALGRPRLHSAAHLPICWEVK

SEQ ID NO: 173 - protein, 1069 aa, Corynebacterium matruchotii
  source 1..1069: note = ATCC 33806
MAAIAIDDDGKPTEILSAISLIHDSGVDPDSAKSAATRLATSGIARRTRRLYRRKRKRLAKLDKFISSQGWPLKEFEKYEDPFYPWRVRAELATTAITDQQELGEKLSIALRHIARHRGWRNPYSKVTALYTVTEPSDAFLAMQEECAKQLGRTIPETITVGQLVTGMNLGKTRLRGENSLLAARPRQSDNANEIHTIAKVQGLSNELVRQIIDHVFAAESPKGSAAEQVGKDPLQPTKKRALKASDAFQQYRIAALIGNLRIRGGKGNRRLTTEETRLVFDYLRSLPAKQEPTWQLVAEQLKIDRGNLVGTAIMTDDGERAGAKPPVHDTNRIMENTKIKPLATWWKSADADARAAMVKALSNAEVDDFDSQAGAQVQEFFFGISDEDQEKLDGLHLPIGRAAYSEDTLDRLTKRMIGEGMDLYEARQAEFKISNDWAPPAPEIGERVGNPAVDRVLKATARWLNAAERQWGAPKSVNIEHVRAAFMSESSARELDRDNQQRAKRNVKVVAEMQEKLGIEGRPSRADVWRFQSIQRQNGKCAYCGAEISFKNSEMDHIIPQVGEGSTNTRDNLVAVCRECNSSKSNIAFAVWAENTSRPGVSVQKAIERTHHWVTDSGLRKPEFDKFRKQVCDRLRRKATDEPIDARSLESVAWMANELRSRIAQKFKDGDTKVRVYKGALTAEARRASGISGKLEFVDGKGKSRLDRRHHAVDAAVVAFTSNYVAETLALRSNMKFDQELRRKAPQWREFTGSDHVHQVEWTKWKYRMQALAELLNNALVQDRIVVMHNLRLRLGNGAAHEDTIGKLTRLKVGDAISTTDIDRASSEALWCALTRDPDYDPKTGLPENPNRTIRIHGTHLTASDEITVFPVAAASIPIRDGFAKLGSNYHHVRLFRVPSGKKYKYCLMQVYTVDLLKFRKEDLFTVELKPQTISVRTCEALLRKALANGTAEYLGWLVSDDELLIDTSSFDTPGIVKLREEYGPVNRWRLAGLTSVTRLNLRPLYLSKEGLKPNVNPEIKKIIDNRSWIITVNKLFSSGHVKIIRRDALGRPRLHSAAHLPICWEVK

SEQ ID NO: 174 - protein, 1079 aa, Dinoroseobacter shibae
MRLGLDIGTSSIGWWLYETDGAGSDARITGVVDGGVRIFSDGRDPKSGASLAVDRRAARAMRRRRDRYLRRRATLMKVLAETGLMPADPAEAKALEALDPFALRAAGLDEPLPLPHLGRALFHLNQRRGFKSNRKTDRGDNESGKIKDATARLDMEMMANGARTYGEFLHKRRQKATDPRHVPSVRTRLSIANRGGPDGKEEAGYDFYPDRRHLEEEFHKLWAAQGAHHPELTETLRDLLFEKIFFQRPLKEPEVGLCLFSGHHGVPPKDPRLPKAHPLTQRRVLYETVNQLRVTADGREARPLTREERDQVIHALDNKKPTKSLSSMVLKLPALAKVLKLRDGERFTLETGVRDAIACDPLRASPAHPDRFGPRWSILDADAQWEVISRIRRVQSDAEHAALVDWLTEAHGLDRAHAEATAHAPLPDGYGRLGLTATTRILYQLTADVVTYADAVKACGWHHSDGRTGECFDRLPYYGEVLERHVIPGSYHPDDDDITRFGRITNPTVHIGLNQLRRLVNRIIETHGKPHQIVVELARDLKKSEEQKRADIKRIRDTTEAAKKRSEKLEELEIEDNGRNRMLLRLWEDLNPDDAMRRFCPYTGTRISAAMIFDGSCDVDHILPYSRTLDDSFPNRTLCLREANRQKRNQTPWQAWGDTPHWHAIAANLKNLPENKRWRFAPDAMTRFEGENGFLDRALKDTQYLARISRSYLDTLFTKGGHVWVVPGRFTEMLRRHWGLNSLLSDAGRGAVKAKNRTDHRHHAIDAAVIAATDPGLLNRISRAAGQGEAAGQSAELIARDTPPPWEGFRDDLRVRLDRIIVSHRADHGRIDHAARKQGRDSTAGQLHQETAYSIVDDIHVASRTDLLSLKPAQLLDEPGRSGQVRDPQLRKALRVATGGKTGKDFENALRYFASKPGPYQAIRRVRIIKPLQAQARVPVPAQDPIKAYQGGSNHLFEIWRLPDGEIEAQVITSFEAHTLEGEKRPHPAAKRLLRVHKGDMVALERDGRRVVGHVQKMDIANGLFIVPHNEANADTRNNDKSDPFKWIQIGARPAIASGIRRVSVDEIGRLRDGGTRPI

SEQ ID NO: 175 - protein, 1332 aa, Dolosigranulum pigrum
  source 1..1332: note = ATCC 51524
MQKNYTIGLDIGTNSVGWAVMKDDYTLIRKRMKVLGNTDIKKIKKNFWGVRLFDEGETAKETRLKRGTRRRYQRRRNRLIYLQDIFQQPMLAIDENFFHRLDDSFFVPDDKSYDRHPIFGSLEEEVAYHNTYPTIYHLRKHLADNPEKADLRLVYTALAHIVKYRGHFLIEGELNTENTSISETFEQFLDTYSDIFKEQLVGDISKVEEILSSKQSRSRKHEQIMALFPNENKLGNFGRFMMLIVGNTSNFKPVFDLDDEYKLKLSDETYEEDLDTLLGMTDDVFLDVFMAAKNVYDAVEMSAIISTDTGNSKAVLSNQMINFYDEHKVDLAQLKQFFKTHLPDKYYECFSDPSKNGYAGYIDGKTNQEDFYKYIEKVMKTIKSDKKDYFLDKIDREVFLRKQRSFYNSVIPHQIHLQEMQAILDRQSQYYPFLAENRDKIESLVTFRIPYYVGPLTVSDQSEFAWMERQSDEPIRPWNFDEIVNKERSAEKFIERMTNMDTYLLEEKVLPKRSLLYQTFEVYNELTKVRYTNEQGKTEKLNRQQKAEIIETLFKQKNRVREKDIANYLEQYGYVDGTDIKGVEDKFNASLSTYNDLAKIDGAKAYLDDPEYADVWEDIIKILTIFEDKAMRKKQLQTYSDTLSPEILKKLERKHYTGWGRFSKKLINGLRDEGSNKTILDYLKSDEGSSGPTNRNFMQLIRDNTLSFKKKIEDAQTIEDTTHIYDTVAELPGSPAIKKGIRQALKIVEEIIDIIGYEPENIVVEMARESQTTKKGKDLSKERLEKLTEAIKEFDGPSDVKVKDLKNENLRNDRLYLYYLQNGRDMYTNEPLDINNLSKYDIDHIIPQSFTTDNSIDNKVLVSRTKNQGNKSDDVPSINIVHKMKPFWRQLHKAGLISDRKFKNLTKAEHGGLTEADRAHFLNRQLVETRQITKHVANLLDSQYNTAEEQRINIVLLKSSMTSRFRKEFKLYKVREINDYHHGHDAYLNAVVATTIMKVYPNLKPQFVYGQYKKTSMFKEEKATARKHFYSNITKFFKKEKVVNEETGEILWDTERHLSTIKRVLSWKQMNIVKKVEKQKGQLWKETIYPKGDSSKLIPVKEGMDPQKYGGLSQVSEAFAVVITHEKGKKKQLKSDLISIPIVDQKAYEQHPTAYLEEAGYNNPTVLHELFKYQLFELEDGSRRMIASAKEFQKGNQMVLPLELVELLYHANRYDKVKFPDSIEYVHDNLAKFDDLLEYVIDFSNKYINADKNVQKIQKIYKEHGTEDVELTVESFVNLMTFTAMGAPATFKFYGESITRSRYTSITEFRGSTLIFQSITGLYETRYKLEDN

SEQ ID NO: 176 - protein, 1340 aa, Dorea longicatena
  source 1..1340: note = DSM 13814
MEQEYYLGLDMGTGSVGWAVTDSEYHVLRKHGKALWGVRLFESASTAEERRMFRTSRRRLDRRNWRIEILQEIFAEEISKKDPGFFLRMKESKYYPEDKRDINGNCPELPYALFVDDDFTDKDYHKKFPTIYHLRKMLMNTEETPDIRLVYLAIHHMMKHRGHFLLSGDINEIKEFGTTFSKLLENIKNEELDWNLELGKEEYAVVESILKDNMLNRSTKKTRLIKALKAKSICEKAVLNLLAGGTVKLSDIFGLEELNETERPKISFADNGYDDYIGEVENELGEQFYIIETAKAVYDWAVLVEILGKYTSISEAKVATYEKHKSDLQFLKKIVRKYLTKEEYKDIFVSTSDKLKNYSAYIGMTKINGKKVDLQSKRCSKEEFYDFIKKNVLKKLEGQPEYEYLKEELERETFLPKQVNRDNGVIPYQIHLYELKKILGNLRDKIDLIKENEDKLVQLFEFRIPYYVGPLNKIDDGKEGKFTWAVRKSNEKIYPWNFENVVDIEASAEKFIRRMTNKCTYLMGEDVLPKDSLLYSKYMVLNELNNVKLDGEKLSVELKQRLYTDVFCKYRKVTVKKIKNYLKCEGIISGNVEITGIDGDFKASLTAYHDFKEILTGTELAKKDKENIITNIVLFGDDKKLLKKRLNRLYPQITPNQLKKICALSYTGWGRFSKKFLEEITAPDPETGEVWNIITALWESNNNLMQLLSNEYRFMEEVETYNMGKQTKTLSYETVENMYVSPSVKRQIWQTLKIVKELEKVMKESPKRVFIEMAREKQESKRTESRKKQLIDLYKACKNEEKDWVKELGDQEEQKLRSDKLYLYYTQKGRCMYSGEVIELKDLWDNTKYDIDHIYPQSKTMDDSLNNRVLVKKKYNATKSDKYPLNENIRHERKGFWKSLLDGGFISKEKYERLIRNTELSPEELAGFIERQIVETRQSTKAVAEILKQVFPESEIVYVKAGTVSRFRKDFELLKVREVNDLHHAKDAYLNIVVGNSYYVKFTKNASWFIKENPGRTYNLKKMFTSGWNIERNGEVAWEVGKKGTIVTVKQIMNKNNILVTRQVHEAKGGLFDQQIMKKGKGQIAIKETDERLASIEKYGGYNKAAGAYFMLVESKDKKGKTIRTIEFIPLYLKNKIESDESIALNFLEKGRGLKEPKILLKKIKIDTLFDVDGFKMWLSGRTGDRLLFKCANQLILDEKIIVTMKKIVKFIQRRQENRELKLSDKDGIDNEVLMEIYNTFVDKLENTVYRIRLSEQAKTLIDKQKEFERLSLEDKSSTLFEILHIFQCQSSAANLKMIGGPGKAGILVMNNNISKCNKISIINQSPTGIFENEIDLLKI

SEQ ID NO: 177 - protein, 1380 aa, Eggerthella sp.
  source 1..1380: note = YY7918
MNLRHVGNYNIGLDMGTASVGWAAIDEQGELLHFKGKPTWGSRLFDSANTAATARMPRGQRRRYIRRRWRLDLLQKFFSEEMAEKDPEFFIRLRQSSLWPEDREGGHTAYHWPLFNDSDFNEKEYYEKFPTIFHLRQWLMETDEKADIRLIYLAFHNIVKHRGNFLQENNDSLSAQNANMRESLESFCIALEEWCDEKELTCSCDPQKLEHLFKEVKYRSDIRDGFAALLGLACSGENEVDVKAMAKEMGKAIVGYKADFSKIFTECDKEGSSFRLSDDEGPEAFLDICPDDGIALFEAIQMVYSSFILTGMLTEKGLSLSKISAYNQYGQDLESLKALVKEYVPNEYSSFFRGPTYSGSTEYDPSKAQGYTRYNLGPSKKGSGAKPMAYEDFKKSVEQLFANTNAINDERYKEMMGRFAEEKFLRRLRTSDNGRIPFQLNLEEMTAIIINQGKYYPFLLEQQEKLESLVRFRIPYYVGPLTRINARLDSKGNACFAWSKRKDGMDSASIKPWNWDEVIDKHASAQAFIERMTGTCTYLRGEPVLPRCSLLYEEYCVLNELNGARWTQDGDKFIRFDYKDRSDIIEELFKKRRGRIQYAAVADWMKQERSHANVHVSGGQGENAFESRLSSYHFFCNDVFGVDELPGSYVDMVEEIILWSTLFEDRSILREEIQRKYGDVLNEEQIKTICKKRFSGWGRLSRKLLCSLKAQTDNGPKSIMDILQEGDQNNGRVGRAMVFQEILHDEQLGFEQKIEEENTQSMLEGENLLIEDLPGSPAIRRSINQAVRIVDEIVGIAGHAPDNIFIEVTREDDTKKKGKRTTTRYSNIQKALEALKEEGAEALRELKTYKHNELDKRLSLYFMQNGKSLYSGIPLDIRRLSEYQIDHIIPQSYIKDDSYENMALVLPGENQSKADNLLISQDIRIKMKATWTALHKAGLMGDKKYNNLMNSSISDAKMKGFINRQLVETSQSVKLTQMMLSQKYPGAKVRPIKASISSQLRDACDLVKCREANDYHHAHDAYLACQVGRFVLKRHSSMFDNPIGMTKVIRDFVKRQGQEFKRNGKLPAYASRSGFIVQSFMRSGFDAETGELLRDDWNAPFEIARIKRCLNYRDCYISRMPMEDSGAFWDATIYSPKAGKKGALPVKQGLPVEKYGSYSREQFAYFFVYKAYNPKKKAYRLEFEAVPVRVASAVETRENALEEYAKSVAKQAGLEFVEVARPKVYKYQLIELGEDRLYITGKREVRNASQLAFSLDEIDLLKRLAEGEETSSEERERLFDVLIEKYARYAPRLARQLSVDSMSATFETLNAEEQLGILLSLVEIANGKRNMIDLSSAGGSKNAGCMNPTFSSELSSPGSNFTFIDQSVTGMFERRQRLEL

SEQ ID NO: 178 - protein, 1195 aa, Elusimicrobium minutum
MQKNINTKQNHIYIKQAQKIKEKLGDKPYRIGLDLGVGSIGFAIVSMEENDGNVLLPKEIIMVGSRIFKASAGAADRKLSRGQRNNHRHTRERMRYLWKVLAEQKLALPVPADLDRKENSSEGETSAKRFLGDVLQKDIYELRVKSLDERLSLQELGYVLYHIAGHRGSSAIRTFENDSEEAQKENTENKKIAGNIKRLMAKKNYRTYGEYLYKEFFENKEKHKREKISNAANNHKFSPTRDLVIKEAEAILKKQAGKDGFHKELTEEYIEKLTKAIGYESEKLIPESGFCPYLKDEKRLPASHKLNEERRLWETLNNARYSDPIVDIVTGEITGYYEKQFTKEQKQKLFDYLLTGSELTPAQTKKLLGLKNTNFEDIILQGRDKKAQKIKGYKLIKLESMPFWARLSEAQQDSFLYDWNSCPDEKLLTEKLSNEYHLTEEEIDNAFNEIVLSSSYAPLGKSAMLIILEKIKNDLSYTEAVEEALKEGKLTKEKQAIKDRLPYYGAVLQESTQKIIAKGFSPQFKDKGYKTPHTNKYELEYGRIANPVVHQTLNELRKLVNEIIDILGKKPCEIGLETARELKKSAEDRSKLSREQNDNESNRNRIYEIYIRPQQQVIITRRENPRNYILKFELLEEQKSQCPFCGGQISPNDIINNQADIEHLFPIAESEDNGRNNLVISHSACNADKAKRSPWAAFASAAKDSKYDYNRILSNVKENIPHKAWRFNQGAFEKFIENKPMAARFKTDNSYISKVAHKYLACLFEKPNIICVKGSLTAQLRMAWGLQGLMIPFAKQLITEKESESFNKDVNSNKKIRLDNRHHALDAIVIAYASRGYGNLLNKMAGKDYKINYSERNWLSKILLPPNNIVWENIDADLESFESSVKTALKNAFISVKHDHSDNGELVKGTMYKIFYSERGYTLTTYKKLSALKLTDPQKKKTPKDFLETALLKFKGRESEMKNEKIKSAIENNKRLFDVIQDNLEKAKKLLEEENEKSKAEGKKEKNINDASIYQKAISLSGDKYVQLSKKEPGKFFAISKPTPTTTGYGYDTGDSLCVDLYYDNKGKLCGEIIRKIDAQQKNPLKYKEQGFTLFERIYGGDILEVDFDIHSDKNSFRNNTGSAPENRVFIKVGTFTEITNNNIQIWFGNIIKSTGGQDDSFTINSMQQYNPRKLILSSCGFIKYRSPILKNKEG

SEQ ID NO: 179 - protein, 1337 aa, Enterococcus faecalis
  source 1..1337: note = ATCC 29200
MKKDYVIGLDIGTNSVGWAVMTEDYQLVKKKMPIYGNTEKKKIKKNFWGVRLFEEGHTAEDRRLKRTARRRISRRRNRLRYLQAFFEEAMTDLDENFFARLQESFLVPEDKKWHRHPIFAKLEDEVAYHETYPTIYHLRKKLADSSEQADLRLIYLALAHIVKYRGHFLIEGKLSTENISVKEQFQQFMIIYNQTFVNGESRLVSAPLPESVLIEEELTEKASRTKKSEKVLQQFPQEKANGLFGQFLKLMVGNKADFKKVFGLEEEAKITYASESYEEDLEGILAKVGDEYSDVFLAAKNVYDAVELSTILADSDKKSHAKLSSSMIVRFTEHQEDLKKFKRFIRENCPDEYDNLFKNEQKDGYAGYIAHAGKVSQLKFYQYVKKIIQDIAGAEYFLEKIAQENFLRKQRTFDNGVIPHQIHLAELQAIIHRQAAYYPFLKENQEKIEQLVTFRIPYYVGPLSKGDASTFAWLKRQSEEPIRPWNLQETVDLDQSATAFIERMTNFDTYLPSEKVLPKHSLLYEKFMVFNELTKISYTDDRGIKANFSGKEKEKIFDYLFKTRRKVKKKDIIQFYRNEYNTEIVTLSGLEEDQFNASFSTYQDLLKCGLTRAELDHPDNAEKLEDIIKILTIFEDRQRIRTQLSTFKGQFSAEVLKKLERKHYTGWGRLSKKLINGIYDKESGKTILGYLIKDDGVSKHYNRNFMQLINDSQLSFKNAIQKAQSSEHEETLSETVNELAGSPAIKKGIYQSLKIVDELVAIMGYAPKRIVVEMARENQTTSTGKRRSIQRLKIVEKAMAEIGSNLLKEQPTTNEQLRDTRLFLYYMQNGKDMYTGDELSLHRLSHYDIDHIIPQSFMKDDSLDNLVLVGSTENRGKSDDVPSKEVVKDMKAYWEKLYAAGLISQRKFQRLTKGEQGGLTLEDKAHFIQRQLVETRQITKNVAGILDQRYNANSKEKKVQIITLKASLTSQFRSIFGLYKVREVNDYHHGQDAYLNCVVATTLLKVYPNLAPEFVYGEYPKFQTFKENKATAKAIIYTNLLRFFTEDEPRFTKDGEILWSNSYLKTIKKELNYHQMNIVKKVEVQKGGFSKESIKPKGPSNKLIPVKNGLDPQKYGGFDSPIVAYTVLFTHEKGKKPLIKQEILGITIMEKTRFEQNPILFLEEKGFLRPRVLMKLPKYTLYEFPEGRRRLLASAKEAQKGNQMVLPEHLLTLLYHAKQCLLPNQSESLAYVEQHQPEFQEILERVVDFAEVHTLAKSKVQQIVKLFEANQTADVKEIAASFIQLMQFNAMGAPSTFKFFQKDIERARYTSIKEIFDATIIYQSTTGLYETRRKVVD

SEQ ID NO: 180 - protein, 1337 aa, Enterococcus faecalis
  source 1..1337: note = ATCC 4200
MKKDYVIGLDIGTNSVGWAVMTEDYQLVKKKMPIYGNTEKKKIKKNFWGVRLFEEGHTAEDRRLKRTARRRISRRRNRLRYLQAFFEEAMTALDENFFARLQESFLVPEDKKWHRHPIFAKLEDEVAYHETYPTIYHLRKKLADSSEQADLRLIYLALAHIVKYRGHFLIEGKLSTENISVKEQFQQFMIIYNQTFVNGESRLVSAPLPESVLIEEELTEKASRTKKSEKVLQQFPQEKANGLFGQFLKLMVGNKADFKKVFGLEEEAKITYASESYEEDLEGILAKVGDEYSDVFLAAKNVYDAVELSTILADSDKKSHAKLSSSMIVRFTEHQEDLKKFKRFIRENCPDEYDNLFKNEQKDGYAGYIAHAGKVSQLKFYQYVKKIIQDIAGAEYFLEKIAQENFLRKQRTFDNGVIPHQIHLAELQAIIHRQAAYYPFLKENQEKIEQLVTFRIPYYIGPLSKGDASTFAWLKRQSEEPIRPWNLQETVDLDQSATAFIERMTNFDTYLSSEKVLPKHSLLYEKFMVFNELTKISYTDDRGIKANFSGKEKEKIFDYLFKTRRKVKKKDIIQFYRNEYNTEIVTLSGLEEDQFNASFSTYQDLLKCGLTRAELDHPDNAEKLEDIIKILTIFEDRQRIRTQLSTFKGQFSAEVLKKLERKHYTGWGRLSKKLINGIYDKESGKTILGYLIKDDGVSKHYNRNFMQLINDSQLSFKNAIQKAQSSEHEETLSETVNELAGSPAIKKGIYQSLKIVDELVAIMGYAPKRIVVEMARENQTTSTGKRRSIQRLKIVEKAMAEIGSNLLKEQPTTNEQLRDTRLFLYYMQNGKDMYTGDELSLHRLSHYDIDHIIPQSFMKDDSLDNLVLVGSTENRGKSDDVPSKEVVKDMKAYWEKLYAAGLISQRKFQRLTKGEQGGLTLEDKAHFIQRQLVETRQITKNVAGILDQRYNANSKEKKVQIITLKASLTSQFRSIFGLYKVREVNDYHHGQDAYLNCVVATTLLKVYPNLAPEFVYGEYPKFQAFKENKATAKAIIYTNLLRFFTEDEPRFTKDGEILWSNSYLKTIKKELNYHQMNIVKKVEVQKGGFSKESIKPKGPSNKLIPVKNGLDPQKYGGFDSPVVAYTVLFTHEKGKKPLIKQEILGITIMEKTRFEQNPILFLEEKGFLRPRVLMKLPKYTLYEFPEGRRRLLASAKEAQKGNQMVLPEHLLTLLYHAKQCLLPNQSESLAYVEQHQPEFQEILERVVDFAEVHTLAKSKVQQIVKLFEANQTADVKEIAASFIQLMQFNAMGAPSTFKFFQKDIERARYTSIKEIFDATIIYQSTTGLYETRRKVVD

SEQ ID NO: 181 - protein, 1337 aa, Enterococcus faecalis
  source 1..1337: note = D6
MKKDYVIGLDIGTNSVGWAVMTEDYQLVKKKMPIYGNTEKKKIKKNFWGVRLFEEGHTAEDRRLKRTARRRISRRRNRLRYLQAFFEEAMTALDENFFARLQESFLVPEDKKWHRHPIFAKLEDEVAYHETYPTIYHLRKKLADSSEQADLRLIYLALAHIVKYRGHFLIEGKLSTENISVKEQFQQFMIIYNQTFVNGESRLVSAPLPESVLIEEELTEKASRTKKSEKVLQQFPQEKANGLFGQFLKLMVGNKADFKKVFGLEEEAKITYASESYEEDLEGILAKVGDEYSDVFLAAKNVYDAVELSTILADSDKKSHAKLSSSMIVRFTEHQEDLKNFKRFIRENCPDEYDNLFKNEQKDGYAGYITHAGKVSQLKFYQYVKKIIQDIAGAEYFLEKIAQENFLRKQRTFDNGVIPHQIHLAELQAIIHRQAAYYPFLKENQEKIEQLVTFRIPYYVGPLSKGDANTFAWLKRQSEEPIRPWNLQETVDLDQSATAFIERMTNFDTYLPSEKVLPKHSLLYEKFMVFNELTKISYTDDRGIKANFSGKEKEKIFDYLFKTRRKVKKKDIIQFYRNEYNTEIVTLSGLEEDQFNASFSTYQDLLKCGLTRAELDHPDNAEKLEDIIKILTIFEDRQRIRTQLSTFKGQFSAEVLKKLERKHYTGWGRLSKKLINGIYDKESGKTILDYLIKDDGVSKHYNRNFMQLINDSQLSFKNAIQKAQSSEHEETLSETVNELAGSPAIKKGIYQSLKIVDELVAIMGYAPKRIVVEMARENQTTSTGKRRSIQRLKIVEKAMAEIGSNLLKEQPTTNEQLRDTRLFLYYMQNGKDMYTGDELSLHRLSHYDIDHIIPQSFMKDDSLDNLVLVGSTENRGKSDDVPSKEVVKDMKAYWEKLYAAGLISQRKFQRLTKGEQGGLTLEDKAHFIQRQLVETRQITKNVAGILDQRYNAKSKEKKVQIITLKASLTSQFRSIFGLYKVREVNDYHHGQDAYLNCVVATTLLKVYPNLAPEFVYGEYPKFQTFKENKATAKAIIYTNLLRFFTEDEPRFTKDGEILWSNSYLKTIKKELNYHQMNIVKKVEVQKGGFSKESIKPKGPSNKLIPVKNGLDPQKYGGFDSPIVAYTVLFTHEKGKKPLIKQEILGITIMEKTRFEQNPILFLEEKGFLRPRVLMKLPKYTLYQFPEGRRRLLASAKEAQKGNQMVLPEHLLTLLYHAKQCLLPNQSESLAYVEQHQPEFQEILERVVDFAEVHTLAKSKVQQIVKLFEANQTADVKEIAASFIQLMQFNAMGAPSTFKFFQKDIERARYTSIKEIFDATIIYQSTTGLYETRRKVVD

SEQ ID NO: 182 - protein, 1337 aa, Enterococcus faecalis
  source 1..1337: note = E1Sol
MKKDYVIGLDIGTNSVGWAVMTEDYQLVKKKMPIYGNTEKKKIKKNFWGVRLFEEGHTAEDRRLKRTARRRISRRRNRLRYLQAFFEEAMTDLDENFFARLQESFLVPEDKKWHRHPIFAKLEDEVAYHETYPTIYHLRKKLADSSEQADLRLIYLALAHIVKYRGHFLIEGKLSTENTSVKEQFQQFMVIYNQTFVNGESRLVSAPLPESVLIEEELTEKASRTKKSEKVLQQFPQEKANGLFGQFLKLMVGNKADFKKVFGLEEEAKITYASESYEEDLEGILAKVGDEYSDVFLAAKNVYDAVELSTILADSDKKSHAKLSSSMIVRFTEHQEDLKKFKRFIRENCPDEYDNLFKNEQKDGYAGYIAHAGKVSQLKFYQYVKKIIQDIAGAEYFLEKIAQENFLRKQRTFDNGVIPHQIHLAELQAIIHRQAAYYPFLKENQEKIEQLVTFRIPYYVGPLSKGDASTFAWLKRQSEEPIRPWNLQETVDLDQSATAFIERMTNFDTYLPSEKVLPKHSLLYEKFMVFNELTKISYTDDRGIKANFSGKEKEKIFDYLFKTRRKVKKKDIIQFYRNEYNTEIVTLSGLEEDQFNASFSTYQDLLKCGLTRAELDHPDNAEKLEDIIKILTIFEDRQRIRTQLSTFKGQFSAEVLKKLERKHYTGWGRLSKKLINGIYDKESGKTILDYLVKDDGVSKHYNRNFMQLINDSQLSFKNAIQKAQSSEHEETLSETVNELAGSPAIKKGIYQSLKIVDELVAIMGYAPKRIVVEMARENQTTSTGKRRSIQRLKIVEKAMAEIGSNLLKEQPTTNEQLRDTRLFLYYMQNGKDMYTGDELSLHRLSHYDIDHIIPQSFMKDDSLDNLVLVGSTENRGKSDDVPSKKVVKKMKAYWEKLYAAGLISQRKFQRLTKGEQGGLTLEDKAHFIQRQLVETRQITKNVAGILDQRYNAKSKEKKVQIITLKASLTSQFRSIFGLYKVREVNDYHHGQDAYLNCVVATTLLKVYPNLAPEFVYGEYPKFQAFKENKATAKTIIYTNLMRFFTEDEPRFTKDSEILWSNSYLKTIKKELNYHQMNIVKKVEVQKGGFSKESIKPKGPSNKLIPVKNGLDPQKYGGFDSPVVAYTVLFTHEKGKKPLIKQEILGITIMEKTRFEQNPILFLEEKGFLRPRVLMKLPKYTLYEFPEGRRRLLASAKEAQKGNQMVLPEHLLTLLYHAKQCLLPNQSESLAYVEQHQPEFQEILERVVDFAEVHTLAKSKVQQIVKLFEANQTADVKEIAASFIQLMQFNAMGAPSTFKFFQKDIERARYTSIKEIFDATIIYQSTTGLYETRRKVVD

SEQ ID NO: 183 - protein, 1150 aa, Enterococcus faecalis
  source 1..1150: note = Fly1
MYSIGLDLGISSVGWSVIDERTGNVIDLGVRLFSAKNSEKNLERRTNRGGRRLIRRKTNRLKDAKKILAAVGFYEDKSLKNSCPYQLRVKGLTEPLSKGEIYKVTLHILKKRGISYLDEDDTEAAKESQDYKEQVRKNAQLLTKYTPGQIQLQRLKENNRVKTGINAQGNYQLNVFKVSAYANELATILKTQQAFYPNELTDDWIALFVQPGIAEEAGLIYRKRPYYHGPGNEANNSPYGRWSDFKKTGQPATNIFDRLIGKDFQGELRASGLSLSAQQYNLLNDLTNLKIDGEIPLSPEQKEYILAELMTKEFTRFGVNDVAKLLGVKKERLSGWRLDKKGKPEIHTLKGYRNWRKIFAESGIDLATLPTETIDCLAKVLTLNTEHEGIENTLAFELPELAESVKLLVLDRYKELSQSVSTQAWHRFSLKTLHLLIPELMNATSEQNTLLEQFQLKSDVRKRYSEYKKLPTKDVLTEIYNPTVNKTVSQAFKVIDALLVKYGKEQIRYITIEMPRDDNEEDEKKRIKELHAKNSQRKNDSQSYFMQKSGWSQEKFQTTIQKNRRFLAKLLYYYEQDGICAYTGLSISPELLVSDSTEIDHIIPISISLDDSINNKVLVLSKANQVKGQQTPYDAWMDGSFKKINGKFSNWDDYQKWVESRHFSHKKENNLLETRNIFDSEQVEKFLARNLNDTRYASRLVLNTLQSFFANHETKVRVVNGSFTHTLRKKWGADLDKTRETHHHHAVDATLCAVTPFVKVSRYHYAVKEETGEKVMREIDFETGEIVDEMSYQEFKKSKKYERKTYQVKWPNFREQLKPVNLHPRIKFSHQVDRKANRKLSDATIYSVREKTEVKTLKSGKQKITTDEYTIGKIKDIYTVDGWEAFKKKQDKLLMKDLDEKTYERLLSIAETTPDFQEVEEKNGKVKRVKRSPFAVYCEENDIPAIQKYAKKNNGPLIRSLKYYDGKLNKHINITKDSQGRPVEKTKNGRKVTLQSLKPYRYDIYQDLETKAYYTVQLYYSDLRFVEGKYGITEKEYMKKVAEQTKGQVVRFCFSLQKNDGLEIEWKDSQRYDVRFYNFQSANSINFKGLEQEMMPAENQFKQKPYNNGAINLNIAKYGKEGKKLRKFNTDILGKKHYLYYEKEPKNIIK

SEQ ID NO: 184 - protein, 1337 aa, Enterococcus faecalis
MKKDYVIGLDIGTNSVGWAVMTEDYQLVKKKMPIYGNTEKKKIKKNFWGVRLFEEGHTAEDRRLKRTARRRISRRRNRLRYLQAFFEEAMTDLDENFFARLQESFLVPEDKKWHRHPIFAKLEDEVAYHETYPTIYHLRKKLADSSEQADLRLIYLALAHIVKYRGHFLIEGKLSTENISVKEQFQQFMIIYNQTFVNGESRLVSAPLPESVLIEEELTEKASRTKKSEKVLQQFPQEKANGLFGQFLKLMVGNKADFKKVFGLEEEAKITYASESYEEDLEGILAKVGDEYSDVFLAAKNVYDAVELSTILADSDKKSHAKLSSSMIVRFTEHQEDLKKFKRFIRENCPDEYDNLFKNEQKDGYAGYIAHAGKVSQLKFYQYVKKIIQDIAGAEYFLEKIAQENFLRKQRTFDNGVIPHQIHLAELQAIIHRQAAYYPFLKENQEKIEQLVTFRIPYYVGPLSKGDASTFAWLKRQSEEPIRPWNLQETVDLDQSATAFIERMTNFDTYLPSEKVLPKHSLLYEKFMVFNELTKISYTDDRGIKANFSGKEKEKIFDYLFKTRRKVKKKDIIQFYRNEYNTEIVTLSGLEEDQFNASFSTYQDLLKCGLTRAELDHPDNAEKLEDIIKILTIFEDRQRIRTQLSTFKGQFSAEVLKKLERKHYTGWGRLSKKLINGIYDKESGKTILDYLVKDDGVSKHYNRNFMQLINDSQLSFKNAIQKAQSSEHEETLSETVNELAGSPAIKKGIYQSLKIVDELVAIMGYAPKRIVVEMARENQTTSTGKRRSIQRLKIVEKAMAEIGSNLLKEQPTTNEQLRDTRLFLYYMQNGKDMYTGDELSLHRLSHYDIDHIIPQSFMKDDSLDNLVLVGSTENRGKSDDVPSKEVVKDMKAYWEKLYAAGLISQRKFQRLTKGEQGGLTLEDKAHFIQRQLVETRQITKNVAGILNQRYNANSKEKKVQIITLKASLTSQFRSIFGLYKVREVNDYHHGQDAYLNCVVATTLLKVYPNLAPEFVYGEYPKFQTFKENKATAKAIIYTNLLRFFTEDEPRFTKDGEILWSNSYLKTIKKELNYHQMNIVKKVEVQKGGFSKESIKPKGPSNKLIPVKNGLDPQKYGGFDSPVVAYTVLFTHEKGKKPLIKQEILGITIMEKTRFEQNPILFLEEKGFLRPRVLMKLPKYTLYEFPEGRRRLLASAKEAQKGNQMVLPEHLLTLLYHAKQCLLPNQSESLAYVEQHQPEFQEILERVVDFAEVHTLAKSKVQQIVKLFEANQTADVKEIAASFIQLMQFNAMGAPSTFKFFQKDIERARYTSIKEIFDATIIYQSTTGLYETRRKVVD

SEQ ID NO: 185 - protein, 1150 aa, Enterococcus faecalis
  source 1..1150: note = R508
MYSIGLDLGISSVGWSVIDERTGNVIDLGVRLFSAKNSEKNLERRTNRGGRRLIRRKTNRLKDAKKILAAVGFYEDKSLKNSCPYQLRVKGLTEPLSKGEIYKVTLHILKKRGISYLDEDDTEAAKESQDYKEQVRKNAQLLTKYTPGQIQLQRLKENNRVKTGINVQGNYQLNVFKVSAYANELATILKTQQAFYPNELTDDWIALFVQPGIAEEAGLIYRKRPYYHGPGNEANNSPYGRWSDFQKTGEPATNIFDKLIGKDFQGELRASGLSLSAQQYNLLNDLTNLKIDGEVPLSSEQKEYILTELMTKEFTRFGVNDVVKLLGVKKERLSGWRLDKKGKPEIHTLKGYRNWRKIFAEAGIDLATLPTETIDCLAKVLTLNTEREGIENTLAFELPELSESVKLLVLDRYKELSQSISTQSWHRFSLKTLHLLIPELMNATSEQNTLLEQFQLKSDVRKRYSEYKKLPTKDVLAEIYNPTVNKTVSQAFKVIDALLVKYGKEQIRYITIEMPRDDNEEDEKKRIKELHAKNSQRKNDSQSYFMQKSGWSQEKFQTTIQKNRRFLAKLLYYYEQDGICAYTGLPISPELLVSDSTEIDHIIPISISLDDSINNKVLVLSKANQVKGQQTPYDAWMDGSFKKINGKFSNWDDYQKWVESRHFSHKKENNLLETRNIFDSEQVEKFLARNLNDTRYASRLVLNTLQSFFTNQETKVRVVNGSFTHTLRKKWGADLDKTRETHHHHAVDATLCAVTPFVKVSRYHYAVKEETGEKVMREIDFETGEIVNEMSYREFKKSKKYERKTYQVKWPNFREQLKPVNLHPRIKFSHQVDRKANRKLSDATIYSVREKTEVKTLKSGKQKITTDEYTIGKIKDIYTLDGWEAFKKKQDKLLMKDLDEKTYERLLSIAETTPDFQEVEEKNGKVKRVKRSPFAVYCEENDIPAIQKYAKKNNGPLIRSLKYYDGKLNKHINITKDSQGRPVEKTKNGRKVTLQSLKPYRYDIYQDLETKAYYTVQLYYSDLRFVEGKYGITEKEYMKKVAEQTKGQVVRFCFSLQKNDGLEIEWKDSQRYDVRFYNFQSANSINFKGLEQEIMPAENQFKQKPYNNGAINLNIAKYGKEGKKLRKFNTDILGKKHYLFYEKEPKNIIK

SEQ ID NO: 186 - protein, 1150 aa, Enterococcus faecalis
  source 1..1150: note = T11
MYSIGLDLGISSVGWSVIDERTGNVIDLGVRLFSAKNSEKNLERRTNRGGRRLIRRKTNRLKDAKKILAAVGFYEDKSLKNSCPYQLRVKGLTEPLSKGEIYKVTLHILKKRGISYLDEDDTEAAKESQDYKEQVRENAQLLTKYTPGQIQLQRLKENNRVKTGINAQGNYQLNVFKVSAYANELATILKTQQAFYPNELTDDWIALFVQPGIAEEAGLIYRKRPYYHGPGNEANNSPYGRWSDFKKTGQPATNIFDKLIGKDFQGELRASGLSLSAQQYNLLNDLTNLKIDGEIPLSPEQKEYILAELMTKEFTRFGVNDVVKLLGVKKERLSGWRLDKKGKPEIHTLKGYRNWRKIFAESGIDLAMLPTETIDCLAKILTLNTEREGIENTLAFELPELAESVKLLVLDRYKELSQSVSTQAWHRFSLKTLHLLIPELMNATSEQNTLLEQFQLKSDVRKRYSEYKKLPTKDVLTEIYNPTVNKTVSQAFKVIDALLVKYGKEQIRYITIEMPRDDNEEDEKKRIKELHAKNSQRKNDSQSYFMQKSGWSQEKFQTTIQKNRRFLAKLLYYYEQDGICAYTGLSISPELLVSDSTEIDHIIPISISLDDSINNKVLVLSKANQVKGQQTPYDAWMDGSFKKINGKFSNWDDYQKWVESRHFSHKKENNLLETRNIFDSEQVEKFLARNLNDTRYASRLVLNTLQSFFANQETKVRVVNGSFTHTLRKKWGADLDKTRETHHHHAVDATLCAVTPFVKVSRYHYAVKEETGEKVMREIDFETGEIVDEMSYREFKKSKKYERKTYQVKWPNFREQLKPVNLHPRIKFSHQVDRKANRKLSDATIYSVREKTEVKTLKSGKQKITTDEYTIGKIKDIYTVDGWEAFKKKQDKLLMKDLDEKTYERLLSIAETTPDFQEVEEKNGKVKRVKRSPFAVYCEENDIPAIRKYAKKNNGPLIRSLKYYDGKLNKHINITKDSQGRPVEKTKNGRKVTLQSLKPYRYDIYQDLETKAYYTVQLYYSDLRFVEGKYGITEKEYMKKVAEQTKGQVVRFCFSLQKNDGLEIEWKDSQRYDVRFYNFQSANSINFKGLEQEMMPAENQFKQKPYNNGAINLNIAKYGKEGKKLRKFNTDILGKKHYLYYEKEPKNIIK

SEQ ID NO: 187 - protein, 1150 aa, Enterococcus faecalis
  source 1..1150: note = TX0012
MYSIGLDLGISSVGWSVIDERTGNVIDLGVRLFSAKNSEKNLERRTNRGGRRLIRRKTNRLKDAKKILAAVGFYEDKSLKNSCPYQLRVKGLTEPLSRGEIYKVTLHILKKRGISYLDEVDTEAAKESQDYKEQVRKNAQLLTKYTPGQIQLQRLKENNRVKTGINAQGNYQLNVFKVSAYANELATILKTQQAFYPNELTDDWIALFVQPGIAEEAGLIYRKRPYYHGPGNEANNSPYGRWSDFQKTGEPATNIFDKLIGKDFQGELRASGLSLSAQQYNLLNDLTNLKIDGEVPLSSEQKEYILTELMTKEFTRFGVNDVVKLLGVKKERLSGWRLDKKGKPEIHTLKGYRNWRKIFAEAGIDLATLPTETIDCLAKVLTLNTEREGIENTLAFELPELSESVKLLVLDRYKELSQSISTQSWHRFSLKTLHLLIPELMNATSEQNTLLEQFQLKSDVRKRYSEYKKLPTKDVLAEIYNPTVNKTVSQAFKVIDALLVKYGKEQIRYITIEMPRDDNEEDEKKRIKELHAKNSQRKNDSQSYFMQKSGWSQEKFQTTIQKNRRFLAKLLYYYEQDGICAYTGLPISPELLVSDSTEIDHIIPISISLDDSINNKVLVLSKANQVKGQQTPYDAWMDGSFKKINGKFSNWDDYQKWVESRHFSHKKENNLLETRNIFDSEQVEKFLARNLNDTRYASRLVLNTLQSFFTNQETKVRVVNGSFTHTLRKKWGADLDKTRETHHHHAVDATLCAVTSFVKVSRYHYAVKEETGEKVMREIDFETGEIVNEMSYWEFKKSKKYERKTYQVKWPNFREQLKPVNLHPRIKFSHQVDRKANRKLSDATIYSVREKTEVKTLKSGKQKITTDEYTIGKIKDIYTLDGWEAFKKKQDKLLMKDLDEKTYERLLSIAETTPDFQEVEEKNGKVKRVKRSPFAVYCEENDIPAIQKYAKKNNGPLIRSLKYYDGKLNKHINITKDSQGRPVEKTKNGRKVTLQSLKPYRYDIYQDLETKAYYTVQLYYSDLRFVEGKYGITEKEYMKKVAEQTKGQVVRFCFSLQKNDGLEIEWKDSQRYDVRFYNFQSANSINFKGLEQEMMPAENQFKQKPYNNGAINLNIAKYGKEGKKLRKFNTDILGKKHYLFYEKEPKNIIK

SEQ ID NO: 188 - protein, 1150 aa, Enterococcus faecalis; identical to SEQ ID NO: 187
  source 1..1150: note = TX0012

SEQ ID NO: 189 - protein, 1337 aa, Enterococcus faecalis
  source 1..1337: note = TX0470
MKKDYVIGLDIGTNSVGWAVMTEDYQLVKKKMPIYGNTEKKKIKKNFWGVRLFEEGHTAEDRRLKRTARRRISRRRNRLRYLQAFFEEAMTALDENFFARLQESFLVPEDKKWHRHPIFAKLEDEVAYHETYPTIYHLRKKLADSSEQADLRLIYLALAHIVKYRGHFLIEGKLSTENISVKEQFQQFMIIYNQTFVNGESRLVSTPLPESVLIEEELTEKASRTKKSEKVLQQFPQEKANGLFGQFLKLMVGNKADFKKVFGLEEEAKITYASESYEEDLEGILAKVGDEYSDVFLAAKNVYDAVELSTILADSDKKSHAKLSSSMIVRFTEHQEDLKNFKRFIRENCPDEYDNLFKNEQKDGYAGYITHAGKVSQLKFYQYVKKIIQDIAGAEYFLEKIAQENFLRKQRTFDNGVIPHQIHLAELQAIIHRQAAYYPFLKENQEKIEQLVTFRIPYYVGPLSKGDASTFAWLKRQSEEPIRPWNLQETVDLDQSATAFIERMTNFDTYLPSEKVLPKHSLLYEKFMVFNELTKISYTDDRGIKANFSGKEKEKIFDYLFKTRRKVKKKDIIQFYRNEYNTEIVTLSGLEEDQFNASFSTYQDLLKCGLTRAELDHPDNAEKLEDIIKILTIFEDRQRIRTQLSTFKGQFSAEVLKKLERKHYTGWGRLSKKLINGIYDKESGKTILDYLVKDDGVSKHYNRNFMQLINDSQLSFKNAIQKAQSSEHEETLSETVNELAGSPAIKKGIYQSLKIVDELVAIMGYAPKRIVVEMARENQTTSTGKRRSIQRLKIVEKAMAEIGSNLLKEQPTTNEQLRDTRLFLYYMQNGKDMYTGDELSLHRLSHYDIDHIIPQSFMKDDSLDNLVLVGSTENRGKSDDVPSKEVVKDMKAYWEKLYAAGLISQRKFQRLTKGEQGGLTLEDKAHFIQRQLVETRQITKNVAGILDQRYNAKSKEKKVQIITLKASLTSQFRSIFGLYKVREVNDYHHGQDAYLNCVVATTLLKVYPNLAPEFVYGEYPKFQTFKENKATAKAIIYTNLLRFFTEDEPRFTKDGEILWSNSYLKTIKKELNYHQMNIVKKVEVQKGGFSKESIKPKGPSNKLIPVKNGLDPQKYGGFDSPIVAYTVLFTHEKGKKPLIKQEILGITIMEKTRFEQNPILFLEEKGFLRPRVLMKLPKYTLYEFPEGRRRLLASAKEAQKGNQMVLPEHLLTLLYHAKQCLLPNQSESLAYVEQHQPEFQEILERVVDFAEVHTLAKSKVQQIVKLFEANQTADVKEIAASFIQLMQFNAMGAPSTFKFFQKDIERARYTSIKEIFDATIIYQSTTGLYETRRKVVD

SEQ ID NO: 190 - protein, 1150 aa, Enterococcus faecalis
  source 1..1150: note = TX1342
MYSIGLDLGVSSVGWSVIDERTGNVIDLGVRLFSAKNSEKNLERRTNRGGRRLIRRKTNRLKDAKKILAAVGFYEDKSLKNSCPYQLRVKGLTEPLSKGEIYKVTLHILKKRGISYLDEDDTEAAKESQDYKEQVRENAQLLTKYTPGQIQLQRLKENNRVKTGINAQGNYQLNVFKVSAYANELATILKTQQAFYPNELTDDWIALFVQPGIAEEAGLIYRKRPYYHGPGNEANNSPYGRWSDFKKTGQPATNIFDKLIGKDFQGELRASGLSLSAQQYNLLNDLTNLKIDGEIPLSPEQKEYILAELMTKEFTRFGINDVAKLLGVKKERLSGWRLDKKGKPEIHTLKGYRNWRKIFAESGIDLATLPTETIDCLAKVLTLNTEREGIENTLAFELPELAESVKLLVLDRYKELSQSVSTQAWHRFSLKTLHLLIPELMNATSEQNTLLEQFQLKSDVRKRYSEYKKLPTKDVLTEIYNPTVNKTVSQAFKVIDALLVKYGKEQIRYITIEMPRDDNEEDEKKRIKELHAKNSQRKNDSQSYFMQKSGWSQEKFQTTIQKNRRFLAKLLYYYEQDGICAYTGLSISPELLVSDSTEIDHIIPISISLDDSINNKVLVLSKANQVKGQQTPYDAWMDGSFKKINGKFSNWDDYQKWVESRHFSHKKENNLLETRNIFDSEQVEKFLARNLNDTRYASRLVLNTLQSFFANQETKVRVVNGSFTHTLRKKWGADLDKTRETHHHHAVDATLCAVTPFVKVSRYHYAVKEETGEKVMREIDFETGEIVDEMSYREFKKSKKYERKTYQVKWPNFREQLKPVNLHPRIKFSHQVDRKANRKLSDATIYSVREKTEVKTLKSGKQKITTDEYTIGKIKDIYTVDGWEAFKKKQDKLLMKDLDEKTYERLLSIAETTPDFQEVEEKNGKVKRVKRSPFAVYCEENDIPAIRKYAKNNNGPLIRSLKYYDGKLNKHINITKDSQGRPVEKTKNGRKVTLQSLKPYRYDIYQDLETKAYYTVQLYYSDLRFVEGKYGITEKEYMKKVAEQTKGQVVRFCFSLQKNDGLEIEWKDSQCYDVRFYNFQSANSINFKGLEQEMMPAENQFKQKPYNNGAINLNIAKYGKEGKKLRKFNTDILGKKHYLYYEKEPKNIIK

SEQ ID NO: 191 - protein, 1337 aa, Enterococcus faecalis
  source 1..1337: note = TX4244
MKKDYVIGLDIGTNSVGWAVMTEDYQLVKKKMPIYGNTEKKKIKKNFWGVRLFEEGHTAEDRRLKRTARRRISRRRNRLRYLQAFFEEAMTDLDENFFARLQESFLVPEDKKWHRHPIFAKLEDEVAYHETYPTIYHLRKKLADSSEQADLRLIYLALAHIVKYRGHFLIEGKLSTENISVKEQFQQFMIIYNQTFVNGESRLVSAPLPESVLIEEELTEKASRTKKSEKVLQQFPQEKANGLFGQFLKLMVGNKADFKKVFGLEEEAKITYASESYEEDLEGILAKVGDEYSDVFLAAKNVYDAVELSTILADSDKKSHAKLSSSMIVRFTEHQEDLKKFKRFIRENCPDEYDNLFKNEQKDGYAGYIAHAGKVSQLKFYQYVKKIIQDIAGAEYFLEKIAQENFLRKQRTFDNGVIPHQIHLAELQAIIHRQAAYYPFLKENQEKIEQLVTFRIPYYVGPLSKGDASTFAWLKRQSEEPIRPWNLQETVDLDQSATAFIERMTNFDTYLPSEKVLPKHSLLYEKFMVFNELTKISYTDDRGIKANFSGKEKEKIFDYLFKTRRKVKKKDIIQFYRNEYNTEIVTLSGLEEDQFNASFSTYQDLLKCGLTRAELDHPDNAEKLEDIIKILTIFEDRQRIRTQLSTFKGQFSAEVLKKLERKHYTGWGRLSKKLINGIYDKESGKTILGYLIKDDGVSKHYNRNFMQLINDSQLSFKNAIQKAQSSEHEETLSETVNELAGSPAIKKGIYQSLKIVDELVAIMGYAPKRIVVEMARENQTTSTGKRRSIQRLKIVEKAMAEIGSNLLKEQPTTNEQLRDTRLFLYYMQNGKDMYTGDELSLHRLSHYDIDHIIPQSFMKDDSLDNLVLVGSTENLGKSDDVPSKEVVKDMKAYWEKLYAAGLISQRKFQRLTKGEQGGLTLEDKAHFIQRQLVETRQITKNVAGILDQRYNANSKEKKVQIITLKASLTSQFRSIFGLYKVREVNDYHHGQDAYLNCVVATTLLKVYPNLAPEFVYGEYPKFQTFKENKATAKAIIYTNLLRFFTEDEPRFTKDGEILWSNSYLKTIKKELNYHQMNIVKKVEVQKGGFSKESIKPKGPSNKLIPVKNGLDPQKYGGFDSPIVAYTVLFTHEKGKKPLIKQEILGITIMEKTRFEQNPILFLEEKGFLRPRVLMKLPKYTLYEFPEGRRRLLASAKEAQKGNQMVLPEHLLTLLYHAKQCLLPNQSESLAYVEQHQPEFQEILERVVDFAEVHTLAKSKVQQIVKLFEANQTADVKEIAASFIQLMQFNAMGAPSTFKFFQKDIERARYTSIKEIFDATIIYQSTTGLYETRRKVVD

SEQ ID NO: 192 - protein, 1339 aa, Enterococcus faecium
  source 1..1339: note = 1,141,733
MKKEYTIGLDIGTNSVGWSVLTDDYRLVSKKMKVAGNTEKSSTKKNFWGVRLFDEGQTAEARRSKRTARRRLARRRQRILELQKIFAPEILKIDEHFFARLNESFLVLDEKKQSRHPVFATIKQEKSYHQTYPTIYHLRQALADSSEKADIRLVYLAMAHLLKYRGHFLIEGELNTENSSVTETFRQFLSTYNQQFSEADDKQTEKLDEAVDCSFVFTEKMSKTKKAETLLKYFPHEKSNGYLSQFIKLMVGNQGNFKNVFGLEEAKLQFSKETYEEDLEELLEKIGDDYIDLFVQAKNVYDAVLLSEILSDSTKNTRAKLSAGMIRRYDAHKEDLVLLKRFVKENLPKKYRAFFGDNSVNGYAGYIEGHATQEDFYKFVKKELTGIRGSEVFLTKIEQENFLRKQRTFDNGVIPHQIHLTELRAIIANQKKHYPFLKEEQEKLESLLTFKIPYYVGPLAKKQENSPFAWLIRKSEEKIKPWNLPEIVDMEGSAVRFIERMINTDMYMPHNKVLPKNSLLYQKFSIYNELTKVRYQDERGQMNYFSSIEKKEIFHELFEKNRKVTKKDLQEFLYLKYDIKHAELSGIEKAFNASYTTYHDFLTMSENKREMKQWLEDPELASMFEEIIKTLTVFEDREMIKTRLSHHEATLGKHIIKKLTKKHYTGWGRLSKELIQGIRDKQSNKTILDYLINDDDFPHHRNRNFMQLINDDSLSFKKEIKKAQMITDTENLEEIVKELTGSPAIKKGILQSLKIVDEIVGIMGYEPANIVVEMARENQTTGRGLKSSRPRLKALEESLKDFGSQLLKEYPTDNSSLQKDRLYLYYLQNGRDMYTGAPLDIHRLSDYDIDHIIPRSFTTDNSIDNKVLVSSKENRLKKDDVPSEKVVKKMRSFWYDLYSSKLISKRKLDNLTKIKLTEEDKAGFIKRQLVETRQITKHVAGILHHRFNKAEDTNEPIRKVRIITLKSALVSQFRNRFGIYKVREINEYHHAHDAYLNGVVALALLKKYPQLAPEFVYGEYLKFNAHKANKATVKKEFYSNIMKFFESDTPVCDENGEIFWDKSKSIAQVKKVINHHHMNIVKKTEIQKGGFSKETVEPKKDSSKLLPRKNNWDPAKYGGLGSPNVAYTVAFTYEKGKARKRTNALEGITIMEREAFEQSPVLFLKNKGYEQAEIEMKLPKYALFELENGRKRMVASNKEAQKANSFLLPEHLVTLLYHAKQYDEISHKESFDYVNEHHKEFSEVFARVLEFAGKYTLAEKNIEKLEKIYKENQTDDLAKLASSFVNLMQFNAMGAPADFKFFDVTIPRKRYTSLTEIWQSTIIHQSITGLYETRIRMGK

SEQ ID NO: 193 - protein, 1340 aa, Enterococcus faecium
  source 1..1340: note = 1,231,408
MKKEYTIGLDIGTNSVGWSVLTDDYRLVSKKMKVAGNTEKSSTKKNFWGVRLFDEGQTAEARRSKRTARRRLARRRQRILELQKIFAPEILKIDEHFFARLNESFLVPDEKKQSRHPVFATIKQEKSYHQTYPTIYHLRQALADSSEKADIRLVYLAMAHLLKYRGHFLIEGELNTENSSVTETFRQFLSTYNQQFSEAGDKQTEKLDEAVDCSFVFTEKMSKTKKAETLLKYFPHEKSNGYLSQFIKLMVGNQGNFKNVFGLEEEAKLQFSKETYEEDLEELLEKIGDDYIDLFVQAKNVYDAVLLSEILSDSTKNTRAKLSAGMIRRYDAHKEDLVLLKRFVKENLPKKYRAFFGDNSVNGYAGYIEGHATQEAFYKFVKKELTGIRGSEVFLTKIEQENFLRKQRTFDNGVIPHQIHLSELRAIIANQKKHYPFLKEEQEKLESLLTFKIPYYVGPLAKKQENSPFAWLIRKSEEKIKPWNLPEIVDMEGSAVRFIERMINTDMYMPHNKVLPKNSLLYQKFSIYNELTKVRYQDERGQMNYFSSIEKKEIFHELFEKNRKVTKKDLQEFLYLKYDIKHAELSGIEKAFNASYTTYHDFLTMSENKREMKQWLEDPELASMFEEIIKTLTVFEDREMIKTRLSHHEATLGKHIIKKLTKKHYTGWGRLSKELIQGIRDKQSNKTILDYLINDDDFPHHRNRNFMQLINDDSLSFKKEIKKAQMITDTENLEEIVKELTGSPAIKKGILQSLKIVDEIVGIMGYEPANIVVEMARENQTTGRGLKSSRPRLKALEESLKDFGSQLLKEYPTDNSSLQKDRLYLYYLQNGRDMYTGAPLDIHRLSDYDIDHIIPRSFTTDNSIDNKVLVSSKENRLKKDDVPSEKVVKKMRSFWYDLYSSKLISKRKLDNLTKIKLTEEDKAGFIKRQLVETRQITKHVAGILHHRFNKAEDTNDPIRKVRIITLKSALVSQFRNRFGIYKVREINEYHHAHDAYLNGVVALALLKKYPQLAPEFVYGEYLKFNAHKANKATVKKEFYSNIMKFFESDTPVCDENGEIFWDKSKSIAQVKKVINHHHMNIVKKTEIQKGGFSKETVEPKKDSSKLLPRKNNWDPAKYGGLGSPNVAYTVAFTYEKGKARKRTNALEGITIMEREAFEQSPVLFLKNKGYEQAEIEMKLPKYALFELENGRKRMVASNKEAQKANSFLLPEHLVTLLYHAKQYDEISHKESFDYVNEHHKEFSEVFARVLEFAGKYTLAEKNIEKLEKIYKENQTDDLAKLASSFVNLMQFNAMGAPADFKFFDVTIPRKRYTSLTEIWQSTIIHQSITGLYETRIRMGK

SEQ ID NO: 194 - protein, 1339 aa, Enterococcus faecium
  source 1..1339: note = E1133
MKKEYTIGLDIGTNSVGWSVLTDDYRLVSKKMKVAGNTEKSSTKKNFWGVRLFDEGQTAEARRSKRTARRRLARRRQRILELQKIFAPEILKIDEHFFARLNESFLVLDEKKQSRHPVFATIKQEKSYHQTYPTIYHLRQALADSSEKADIRLVYLAMAHLLKYRGHFLIEGELNTENSSVTETFRQFLSTYNQQFSEADDKQTEKLDEAVDCSFVFTEKMSKTKKAETLLKYFPHEKSNGYLSQFIKLMVGNQGNFKNVFGLEEAKLQFSKETYEEDLEELLEKIGDDYIDLFVQAKNVYDAVLLSEILSDSTKNTRAKLSAGMIRRYDAHKEDLVLLKRFVKENLPKKYRAFFGDNSVNGYAGYIEGHATQEDFYKFVKKELTGIRGSEVFLTKIEQENFLRKQRTFDNGVIPHQIHLTELRAIIANQKKHYPFLKEEQEKLESLLTFKIPYYVGPLAKKQENSPFAWLIRKSEEKIKPWNLPEIVDMEGSAVRFIERMINTDMYIPHNKVLPKNSLLYQKFSIYNELTKVRYQDERGQMNYFSSIEKKEIFHELFEKNRKVTKKDLQEFLYLKYDIKHAELSGIEKAFNASYTTYHDFLTMSENKREMKQWLEDPELASMFEEIIKTLTVFEDREMIKTRLSHHEATLGKHIIKKLTKKHYTGWGRLSKELIQGIRDKQSNKTILDYLINDDDFPHHRNRNFMQLINDDSLSFKKEIKKAQMITDTENLEEIVKELTGSPAIKKGILQSLKIVDEIVGIMGYEPANIVVEMARENQTTGRGLKSSRPRLKALEESLKDFGSQLLKEYPTDNSSLQKDRLYLYYLQNGRDMYTGAPLDIHRLSDYDIDHIIPRSFTTDNSIDNKVLVSSKENRLKKDDVPSEKVVKKMRSFWYDLYSSKLISKRKLDNLTKIKLTEEDKAGFIKRQLVETRQITKHVAGILHHRFNKAEDTNEPIRKVRIITLKSALVSQFRNRFGIYKVREINEYHHAHDAYLNGVVALALLKKYPQLAPEFVYGEYLKFNAHKANKATVKKEFYSNIMKFFESDTPVCDENGEIFWDKSKSIAQVKKVINHHHMNIVKKTEIQKGGFSEETVEPKKDSSKLLPRKNNWDPAKYGGLGSPNVAYTVAFTYEKGKARKRTNALEGITIMEREAFEQSPVLFLKNKGYEQAEIEMKLPKYALFELENGRKRMVASNKEAQKANSFLLPEHLVTLLYHAKQYDEISHKESFDYVNEHHKEFSEVFARVLEFAGKYTLAEKNIEKLEKIYKENQTDDLAKLASSFVNLMQFNAMGAPADFKFFDVTIPRKRYTSLTEIWQSTIIHQSITGLYETRIRMGK

SEQ ID NO: 195 - protein, 1340 aa, Enterococcus faecium
  source 1..1340: note = E3083
MKKEYTIGLDIGTNSVGWSVLTDDYRLVSKKMKVAGNTEKSSTKKNFWGVRLFDEGQTAEARRSKRTARRRLARRRQRILELQKIFAPEILKIDEHFFARLNESFLVLDEKKQSRHPVFATIKQEKSYHQTYPTIYHLRQALADSSEKADIRLVYLAMAHLLKYRGHFLIEGELNTENSSVTETFRQFLSTYNQQFSEADDKQTEKLDEAVDCSFVFTEKMSKTKKAETLLKYFPHEKSNGYLSQFIKLMVGNQGNFKNVFGLEEEAKLQFSKETYEEDLEELLEKIGDDYIDLFVQAKNVYDAVLLSEILSDSTKNTRAKLSAGMIRRYDAHKEDLVLLKRFVKENLPKKYRAFFGDNSVNGYAGYIEGHATQEDFYKFVKKELTGIRGSEVFLTKIEQENFLRKQRTFDNGVIPHQIHLTELRAIIANQKKHYPFLKEEQEKLESLLTFKIPYYVGPLAKKQENSPFAWLIRKSEEKIKPWNLPEIVDMEGSAVRFIERMINTDMYIPHNKVLPKNSLLYQKFSIYNELTKVRYQDERGQMNYFSSIEKKEIFHELFEKNRKVTKKDLQEFLYLKYDIKHAELSGIEKAFNASYTTYHDFLTMSENKREMKQWLEDPELASMFEEIIKTLTVFEDREMIKTRLSHHEATLGKHIIKKLTKKHYTGWGRLSKELIQGIRDKQSNKTILDYLINDDDFPHHRNRNCMQLINDDSLSFKKEIKKAQMITDTENLEEIVKELTGSPAIKKGILQSLKIVDEIVGIMGYEPANIVVEMARENQTTGRGLKSSRPRLKALEESLKDFGSQLLKEYPTDNSSLQKDRLYLYYLQNGRDMYTGAPLDIHRLSDYDIDHIIPRSFTTDNSIDNKVLVSSKENRLKKDDVPSEKVVKKMRSFWYDLYSSKLISKRKLDNLTKIKLTEEDKAGFIKRQLVETRQITKHVAGILHHRFNKAEDTNEPIRKVRIITLKSALVSQFRNRFGIYKVREINEYHHAHDAYLNGVVALALLKKYPQLAPEFVYGEYLKFNAHKANKATVKKEFYSNIMKFFESDTPVCDENGEIFWDKSKSIAQVKKVINHHHMNIVKKTEIQKGGFSKETVEPKKDSSKLLPRKNNWDPTKYGGLGSPNVAYTVAFTYEKGKARKRTNALEGITIMEREAFEQSPVLFLKNKGYEQAEIEMKLPKYALFELENGRKRMVASNKEAQKANSFLLPEHLVTLLYHAKQYDEISHKESFDYVNEHHKEFSEVFARVLEFAGKYTLAEKNIEKLEKIYKENQTDDLAKLASSFVNLMQFNAMGAPADFKFFDVTIPRKRYTSLTEIWQSTIIHQSITGLYETRIRMGK

SEQ ID NO: 196 - protein, 1340 aa, Enterococcus faecium
  source 1..1340: note = PC4.1
MKKEYTIGLDIGTNSVGWSVLTDDYRLVSKKMKVAGNTEKSSTKKNFWGVRLFDEGQTAEARRSKRTARRRLARRRQRILELQKIFAPEILKIDEHFFARLNESFLVLDEKKQSRHPVFATIKQEKSYHQTYPTIYHLRQALADSSEKADIRLVYLAMAHLLKYRGHFLIEGELNTENSSVTETFRQFLSTYNQQFSEADDKQTEKLDEAVDCSFVFTEKMSKTKKAETLLKYFPHEKSNGYLSQFIKLMVGNQGNFKNVFGLEEEAKLQFSKETYEEDLEELLEKIGDDYIDLFVQAKNVYDAVLLSEILSDSTKNTRAKLSAGMIRRYDAHKEDLVLLKRFVKENLPKKYRAFFGDNSVNGYAGYIEGHATQEDFYKFVKKELTGIRGSEVFLTKIEQENFLRKQRTFDNGVIPHQIHLTELRAIIANQKKHYPFLKEEQEKLESLLTFKIPYYVGPLAKKQENSPFAWLIRKSEEKIKPWNLPEIVDMEGSAVRFIERMINTDMYIPHNKVLPKNSLLYQKFSIYNELTKVRYQDERGQMNYFSSIEKKEIFHELFEKNRKVTKKDLQEFLYLKYDIKHAELSGIEKAFNASYTTYHDFLTMSENKREMKQWLEDPELASMFEEIIKTLTVFEDREMIKTRLSHHEATLGKHIIKKLTKKHYTGWGRLSKELIQGIRDKQSNKTILDYLINDDDFPHHRNRNFMQLINDDSLSFKKEIKKAQMITDTENLEEIVKELTGSPAIKKGILQSLKIVDEIVGIMGYEPANIVVEMARENQTTGRGLKSSRPRLKALEESLKDFGSQLLKEYPTDNSSLQKDRLYLYYLQNGRDMYTGAPLDIHRLSDYDIDHIIPRSFTTDNSIDNKVLVSSKENRLKKDDVPSEKVVKKMRSFWYDLYSSKLISKRKLDNLTKIKLTEEDKAGFIKRQLVETRQITKHVAGILHHRFNKAEDTNEPIRKVRIITLKSALVSQFRNRFGIYKVREINEYHHAHDAYLNGVVALALLKKYPQLAPEFVYGEYLKFNAHKANKATVKKEFYSNIMKFFESDTPVCDENGEIFWDKSKSIAQVKKVINHHHMNIVKKTEIQKGGFSKETVEPKKDSSKLLPRKNNWDPAKYGGLGSPNVAYTVAFTYEKGKARKRTNALEGITIMEREAFEQSPVLFLKNKGYEQAEIEMKLPKYALFELENGRKRMVASNKEAQKANSFLLPEHLVTLLYHAKQYDEISHKESFDYVNEHHKEFSEVFARVLEFAGKYTLAEKNIEKLEKIYKENQTDDLAKLASSFVNLMQFNAMGAPADFKFFDVTIPRKRYTSLTEIWQSTIIHQSITGLYETRIRMGK

SEQ ID NO: 197 - protein, 1340 aa, Enterococcus faecium
  source 1..1340: note = TX1330
MKKEYTIGLDIGTNSVGWSVLTDDYRLVSKKMKVAGNTEKSSTKKNFWGVRLFDEGQTAEARRSKRTARRRLARRRQRILELQKIFAPEILKIDEHFFARLNESFLVLDEKKQSRHPVFATIKQEKSYHQTYPTIYHLRQALADSSEKADIRLVYLAMAHLLKYRGHFLIEGELNTENSSVTETFRQFLSTYNQQFSEADDKQTEKLDEAVDCSFVFTEKMSKTKKAETLLKYFPHEKSNGYLSQFIKLMVGNQGNFKNVFGLEEEAKLQFSKETYEEDLEELLEKIGDDYIDLFVQAKNVYDAVLLSEILSDSTKNTRAKLSAGMIRRYDAHKEDLVLLKRFVKENLPKKYRAFFGDNSVNGYAGYIEGHATQEDFYKFVKKELTGIRGSEVFLTKIEQENFLRKQRTFDNGVIPHQIHLTELRAIIANQKKHYPFLKEEQEKLESLLTFKIPYYVGPLAKKQENSPFAWLIRKSEEKIKPWNLPEIVDMEGSAVRFIERMNNTDMYIPHNKVLPKNSLLYQKFSIYNELTKVRYQDERGQMNYFSSIEKKEIFHELFEKNRKVTKKDLQEFLYLKYDIKHAELSGIEKAFNASYTTYHDFLTMSENKREMKQWLEDPELASMFEEIIKTLTVFEDREMIKTRLSHHEATLGKHIIKKLTKKHYTGWGRLSKELIQGIRDKQSNKTILDYLINDDDFPHHRNRNFMQLINDDSLSFKKEIKKAQMITDTENLEEIVKELTGSPAIKKGILQSLKIVDEIVGIMGYEPANIVVEMARENQTTGRGLKSSRPRLKALEESLKDFGSQLLKEYPTDNSSLQKDRLYLYYLQNGRDMYTGAPLDIHRLSDYDIDHIIPRSFTTDNSIDNKVLVSSKENRLKKDDVPSEKVVKKMRSFWYDLYSSKLISKRKLDNLTKIKLTEEDKAGFIKRQLVETRQITKHVAGILHHRFNKAEDTNEPIRKVRIITLKSALVSQFRNRFGIYKVREINEYHHAHDAYLNGVVALALLKKYPQLAPEFVYGEYLKFNAHKANKATVKKEFYSNIMKFFESDTPVCDENGEIFWDKSKSIAQVKKVINHHHMNIVKKTEIQKGGFSKETVEPKKDSSKLLPRKNNWDPAKYGGLGSPNVAYTVAFTYEKGKARKRTNALEGITIMEREAFEQSPVLFLKNKGYEQAEIEMKLPKYALFELENGRKRMVASNKEAQKANSFLLPEHLVTLLYHAKQYDEISHKESFDYVNEHHKEFSEVFARVLEFAGKYTLAEKNIEKLEKIYKENQTDDLAKLASSFVNLMQFNAMGAPADFKFFDVTIPRKRYTSLTEIWQSTIIHQSITGLYETRIRMGK

SEQ ID NO: 198 - protein, 1340 aa, Enterococcus faecium
  source 1..1340: note = TX1337RF
MKKEYTIGLDIGTNSVGWSVLTDDYRLVSKKMKVAGNTEKSSTKKNFWGVRLFDEGQTAEARRSKRTARRRLARRRQRILELQKIFAPEILKIDEHFFARLNESFLVLDEKKQSRHPVFATIKQEKSYHQTYPTIYHLRQALADSSEKADIRLVYLAMAHLLKYRGHFLIEGELNTENSSVTETFRQFLSTYNQQFSEADDKQTEKLDEAVDCSFVFTEKMSKTKKAETLLKYFPHEKSNGYLSQFIKLMVGNQGNFKNVFGLEEEAKLQFSKETYEEDLEELLEKIGDDYIDLFVQAKNVYDAVLLSEILSDSTKNTRAKLSAGMIRRYDAHKEDLVLLKRFVKENLPKKYRAFFGDNSVNGYAGYIEGHATQEDFYKFVKKELTGIRGSEVFLTKIEQENFLRKQRTFDNGVIPHQIHLTELRAIIANQKKHYPFLKEEQEKLESLLTFKIPYYVGPLAKKQENSPFAWLIRKSEEKIKPWNLPEIVDMEGSAVRFIERMINTDMYMPHNKVLPKNSLLYQKFSIYNELTKVRYQDERGQMNYFSSIEKKEIFHELFEKNRKVTKKDLQEFLYLKYDIKHAELSGIEKAFNASYTTYHDFLTMSENKREMKQWLEDPELASMFEEIIKTLTVFEDREMIKTRLSHHEATLGKHIIKKLTKKHYTGWGRLSKELIQGIRDKQSNKTILDYLINDDDFPHHRNRNFMQLINDDSLSFKKEIKKAQMITDTENLEEIVKELTGSPAIKKGILQSLKIVDEIVGIMGYEPANIVVEMARENQTTGRGLKSSRPRLKALEESLKDFGSQLLKEYPTDNSSLQKDRLYLYYLQNGRDMYTGAPLDIHRLSDYDIDHIIPRSFTTDNSIDNKVLVSSKENRLKKDDVPSEKVVKKMRSFWYDLYSSKLISKRKLDNLTKIKLTEEDKAGFIKRQLVETRQITKHVAGILHHRFNKAEDTNEPIRKVRIITLKSALVSQFRNRFGIYKVREINEYHHAHDAYLNGVVALALLKKYPQLAPEFVYGEYLKFNAHKANKATVKKEFYSNIMKFFESDTPVCDENGEIFWDKSKSIAQVKKVINHHHMNIVKKTEIQKGGFSKETVEPKKDSSKLLPRKNNWDPAKYGGLGSPNVAYTVAFTYEKGKARKRTNALEGITIMEREAFEQSPVLFLKNKGYEQAEIEMKLPKYALFELENGRKRMVASNKEAQKANSFLLPEHLVTLLYHAKQYDEISHKESFDYVNEHHKEFSEVFARVLEFAGKYTLAEKNIEKLEKIYKENQTDDLAKLASSFVNLMQFNAMGAPADFKFFDVTIPRKRYTSLTEIWQSTIIHQSITGLYETRIRMGK

SEQ ID NO: 199 - protein, 1336 aa, Enterococcus hirae
MTKDYTIGLDIGTNSVGWAVLTDDYQLMKRKMSVHGNTEKKKIKKNFWGARLFDEGQTAEFRRTKRTNRRRLARRKYRLSKLQDLFAEELCKQDDCFFVRLEESFLVPEEKQYKPASIFPTLEEEKEYYQKYPTIYHLRQKLVDSTEKEDLRLVYLALAHLLKYRGHFLFEGDLDTENTSIEESFRVFLEQYSKQSDQPLIVHQPVLTILTDKLSKTKKVEEILKYYPTEKINSFFAQCLKLIVGNQANFKRIFDLEAEVKLQFSKETYEEDLESLLEKIGDEYLDIFLQAKKVHDAILLSEIISSTVKHTKAKLSSGMVERYERHKADLAKFKQFVKENVPQKATVFFKDTTKNGYAGYIKGKTTQEEFYKFVKKELSGVVGSEPFLEKIDQETFLLKQRTYTNGVIPHQVHLIELKAIIDQQKQHYPFLEEAGPKIIALFKFRIPYYVGPLAKEQEASSFAWIERKTAEKINPWNFSEVVDIEKSAMRFIQRMTKQDTYLPTEKVLPKNSLLYQKYMIFNELTKVSYKDERGVKQYFSGDEKQQIFKQLFQKERGKITVKKLQNFLYTHYHIENAQIFGIEKAFNASYSTYHDFMKLAKTNQKAMQEWLEQPEMEPIFEDIVKILTIFEDRQMIKHQLSKYQEVFGEKLLKEFARKHYTGWGRFSAKLIHGIRDRKTNKTILDYLINDDDVPANRNRNLMQLINDEHLSFKEEIAKATVFSKHKSLVDVIQDLPGSPAIKKGIWQSLKIVEELIAIIGYKPKNIVIEMARENQKTHRTSPRLKALENGLKQIGSTLLKEQPTDNKALQKERLYLYYLQNGRDMYTGEPLEIENLHQYEVDHIIPRSFIVDNSIDNKVLVASKQNQKKRDDVPKKQIVNEQRIFWNQLKEAKLISPKKYAYLTKIELTPEDKARFIQRQLVETRQITKHVANILHQSFNQEEEGTDCDGVQIITLKATLTSQFRQTFGLYKVREINPHHHAHDAYLNGFIANVLLKRYPKLAPEFVYGKYVKYSLARENKATAKKEFYSNILKFLESDEPFCDENGEIYWEKSHHLPRIKKVLSSHQVNVVKKVEQQKGGFYKETVNSKEKPDKLIERKNNWDVTKYGGFGSPVIAYAIAFVYAKGKTQKKTRAIEGITIMEQAAFEKDPTTFLKEKGFPQVTEFIKLPKYTLFEFDNGRRRFLASHKESQKGNPFILSDQLVTLLYHAQHYDKITYQESFDYVNTHLSDFSAILTEVLAFAEKYTLADKNIERIQELYEENKYGETSMIAQSFLQLLQFNAIGAPADFKFFGVTIPRKRYTSLTEIWDATIIYQSVTGLYETRIRMGDLWAGEQ

SEQ ID NO: 200 - protein, 1330 aa, Enterococcus italicus
  source 1..1330: note = DSM 15952
MKNDYTIGLDIGTNSVGYSVVTDDYKVISKKMNVFGNTEKKSIKKNFWGVRLFESGQTAQEARMKRTSRRRIARRKNRICYLQEIFQPEMNHLDNNFFYRLNESFLVADDAKYDKHPIFGTLDEEIHFHEQFPTIYHLRKYLADGDEKADLRLVYLAIAHIIKFRGNFLIEGELNTENNSVIELSKVFVQLYNQTLSELEGFQFIDESIDFSEVLTQQLSKSERADNVLKLFPDEKGTGIFAQFIKLIVGNQGNFKKVFQLEEDQKLQLSTDDYEENIENLLAIIGDEYGDIFVAAQNLYQAILLAGILTSTEKTRAKLSASMIQRYEEHAKDLKLLKRFVKEHIPDKYAEIFNDATKNGYAGYIDGKTKEEEFYKYLKTTLVQKSGYQYFIEKIEQENFLRKQRIYDNGVIPHQVHAEELRAILRKQEKYYSFLKENHEKIEQIFKVRIPYYVGPLAKHNEQSRFAWNIRKSDEPIRPWNMNDVVDENASAVAFIERMTIKDIYLNENVLPRHSLIYEKFTVFNELTKVLYADDRGVFQRFSAEEKEDIFEKLFKSERKVTKKKLENYLRIELSISSPSVKGIEEQFNANFGTYLDLKKFDELHPYLDDEKYQDTLEEVIKVLTVFEDRSMIQNQLEQLPLNLSTKTIKALSRRKYTGWGRLSARLIDGIHDKNSGKTILDYLIEDESDSYIVNRNFMQLINDDHLSFKKIIEDSQPYKEQQSAEEIVSELSGSPAIKKGILQSLKIVDELVAIMGYKPKNIVVEMARENQTTGRGKQNSKPRLKGIENGLKEFSDSVLKGSSIDNKQLQNDRLYLYYLQNGKDMYTGHELDIDHLSTYDIDHIIPQSFLTDNSIDNRVLTTSKSNRGKSDNVPSEEVVRKMDRFWRKLLNAKLISERKYTNLTKKELTESDKAGFLKRQLVETRQITKHVATILDSKFNEDSNNRDVQIITLKSALVSEFRKTFNLYKVREINDLHHAHDAYLNAVVALSLLRVYPQLKPEFVYGEYGKNSIHDQNKATIKKQFYSNITRYFASKDYIINDDGEILWNKQETIAQVIKTLGMHQVNVVKKVEIQKGGFSKESIQPKGESQKLIRRKQQWNTKKYGGFDSPVVAYAILLSFDKGKRKARSFKIVGITIQDRESFEGNPILYLSKKDYHNPKVEAILPKYSLFEFENGRRRMVASASETQKGNQLIIPGHLMELLYHSKKIINGKNSDSVSYIQNNKEKFREIFEYIVDFSSKYISADANLNKIEKIFENNFHKASEQEIAKSFINLLTFTAMGAPADFEFFGEKIPRKRYVSISEIIDAVFIHQSITGLYETRVRLTEV

SEQ ID NO: 201 - protein, 1096 aa, Eubacterium dolichum
  source 1..1096: note = DSM 3991
MMEVFMGRLVLGLDIGITSVGFGIIDLDESEIVDYGVRLFKEGTAAENETRRTKRGGRRLKRRRVTRREDMLHLLKQAGIISTSFHPLNNPYDVRVKGLNERLNGEELATALLHLCKHRGSSVETIEDDEAKAKEAGETKKVLSMNDQLLKSGKYVCEIQKERLRTNGHIRGHENNFKTRAYVDEAFQILSHQDLSNELKSAIITIISRKRMYYDGPGGPLSPTPYGRYTYFGQKEPIDLIEKMRGKCSLFPNEPRAPKLAYSAELFNLLNDLNNLSIEGEKLTSEQKAMILKIVHEKGKITPKQLAKEVGVSLEQIRGFRIDTKGSPLLSELTGYKMIREVLEKSNDEHLEDHVFYDEIAEILTKTKDIEGRKKQISELSSDLNEESVHQLAGLTKFTAYHSLSFKALRLINEEMLKTELNQMQSITLFGLKQNNELSVKGMKNIQADDTAILSPVAKRAQRETFKVVNRLREIYGEFDSIVVEMAREKNSEEQRKAIRERQKFFEMRNKQVADIIGDDRKINAKLREKLVLYQEQDGKTAYSLEPIDLKLLIDDPNAYEVDHIIPISISLDDSITNKVLVTHRENQEKGNLTPISAFVKGRFTKGSLAQYKAYCLKLKEKNIKTNKGYRKKVEQYLLNENDIYKYDIQKEFINRNLVDTSYASRVVLNTLTTYFKQNEIPTKVFTVKGSLTNAFRRKINLKKDRDEDYGHHAIDALIIASMPKMRLLSTIFSRYKIEDIYDESTGEVFSSGDDSMYYDDRYFAFIASLKAIKVRKFSHKIDTKPNRSVADETIYSTRVIDGKEKVVKKYKDIYDPKFTALAEDILNNAYQEKYLMALHDPQTFDQIVKVVNYYFEEMSKSEKYFTKDKKGRIKISGMNPLSLYRDEHGMLKKYSKKGDGPAITQMKYFDGVLGNHIDISAHYQVRDKKVVLQQISPYRTDFYYSKENGYKFVTIRYKDVRWSEKKKKYVIDQQDYAMKKAEKKIDDTYEFQFSMHRDELIGITKAEGEALIYPDETWHNFNFFFHAGETPEILKFTATNNDKSNKIEVKPIHCYCKMRLMPTISKKIVRIDKYATDVVGNLYKVKKNTLKFEFD

SEQ ID NO: 202 - protein, 1114 aa, Eubacterium rectale
MNYTEKEKLFMKYILALDIGIASVGWAILDKESETVIEAGSNIFPEASAADNQLRRDMRGAKRNNRRLKTRINDFIKLWENNNLSIPQFKSTEIVGLKVRAITEEITLDELYLILYSYLKHRGISYLEDALDDTVSGSSAYANGLKLNAKELETHYPCEIQQERLNTIGKYRGQSQIINENGEVLDLSNVFTIGAYRKEIQRVFEIQKKYHPELTDEFCDGYMLIFNRKRKYYEGPGNEKSRTDYGRFTTKLDANGNYITEDNIFEKLIGKCSVYPDELRAAAASYTAQEYNVLNDLNNLTINGRKLEENEKHEIVERIKSSNTINMRKIISDCMGENIDDFAGARIDKSGKEIFHKFEVYNKMRKALLEIGIDISNYSREELDEIGYIMTINTDKEAMMEAFQKSWIDLSDDVKQCLINMRKTNGALFNKWQSFSLKIMNELIPEMYAQPKEQMTLLTEMGVTKGTQEEFAGLKYIPVDVVSEDIFNPVVRRSVRISFKILNAVLKKYKALDTIVIEMPRDRNSEEQKKRINDSQKLNEKEMEYIEKKLAVTYGIKLSPSDFSSQKQLSLKLKLWNEQDGICLYSGKTIDPNDIINNPQLFEIDHIIPRSISFDDARSNKVLVYRSENQKKGNQTPYYYLTHSHSEWSFEQYKATVMNLSKKKEYAISRKKIQNLLYSEDITKMDVLKGFINRNINDTSYASRLVLNTIQNFFMANEADTKVKVIKGSYTHQMRCNLKLDKNRDESYSHHAVDAMLIGYSELGYEAYHKLQGEFIDFETGEILRKDMWDENMSDEVYADYLYGKKWANIRNEVVKAEKNVKYWHYVMRKSNRGLCNQTIRGTREYDGKQYKINKLDIRTKEGIKVFAKLAFSKKDSDRERLLVYLNDRRTFDDLCKIYEDYSDAANPFVQYEKETGDIIRKYSKKHNGPRIDKLKYKDGEVGACIDISHKYGFEKGSKKVILESLVPYRMDVYYKEENHSYYLVGVKQSDIKFEKGRNVIDEEAYARILVNEKMIQPGQSRADLENLGFKFKLSFYKNDIIEYEKDGKIYTERLVSRTMPKQRNYIETKPIDKAKFEKQNLVGLGKTKFIKKYRYDILGNKYSCSEEKFTSFC

SEQ ID NO: 203 - protein, 1391 aa, Eubacterium sp.
  source 1..1391: note = AS15
MENKQYYIGLDVGTNSVGWAVTDTSYNLLRAKGKDMWGARLFDEAKTAVERRTKRTSRRRSEREKARKAMLKELFADEINKVDPNFFIRLEESKFFLDDRSENNRQRYTLFNDAKFTDKDYYEKYKTIFHLRSALINSDEKFDVRLVFLAILNLFSHRGHFLNASLKGDGEIQGVDIFYNDLYEVCEEFEIDLPQISNIDNFEKILSQKGKSRTKILEELSEELSISKKEKIKYSLLKLICGMKIKVVDIYADEDIQEDDKKKDLGFRESDYEKSSLEVKEIIGDDHFELIERAKAVHDIGLLANIIGNSKYLCEARVEAYDNHHKDLQKIKELLKKYDIKAYTDMFRKMTDKNYSAYVGSVNSNIAKERRSVDNRKIEDLYEYIKKIALKNISDDNEDKIEILKKIETGEFLKKQLTASNGVIPNQLQSRELRAILKKAENYLPFLKEKGEKNLTVSEMIIQLFEFQIPYYVGPLDKNPKKDKNANSWAVIPSGGRILPWNFEDKVDVKGSRKEFIEKMVRKCTYLSEEHTLPKQSLLYEKFMVLNEINNIKIDGEKISVEAKQKIYNDLFMKGKKVSQKAIKQELISLNIMSKDSVLSGIDTVCNAYLSSIAKFRGVFDENVNNQSTIDMIEDIIFLKTVYSDEKRFVKEEIVEKYGDEIDKDKIKRILGFKFSNWGNISKSFLELEGADVGTGEIRSIIQSLWETNFNLMELLSSRFTYMDELEKRVKKLEKPLSEWTIEDLDDMYLSSPVKRMIWQSMKIVDEIQTVIGYAPKRIFVEMTRSEGEKVRTKSRKDRLKELYSAIKEDSKQWVKELDAKDESYFRSKKMYLYYLQKGRCMYSGEVIELDKLMDDNLYDIDHIYPRSFVKDDSLDNLVLVKKEINNRKQNDPITPQIQASCQGFWKVLHEQGFISNEKYSRLTRKTQEFSDEEKLSFINRQIVETGQATKCMAQILQKSMGEDVDVVFSKARLVSEFRHKFELFKSRLINDFHHANDAYLNIVVGNSYFVKFTRNPANFIKDARKNPDNPAYKYHMDRFFERDVKSKSEVAWIGQSEGNAGTIAIVKKTMSKNSPLITKKVEEGHGSITKETIVGVKEIKFGRNKVEKADKTPKKANLQAYRPIKTSDERLCNILRYGGRTSISISGYCLVEYVKKRKTIRSLEAIPVYLGRKDSLSEEKLLNYFRYNLNDGGKDSVSDIRLCLPFISTNSLVKIDGYLYYLGGKNDDRIQLYNAYQLKMKKEEVEYIRKIEKAVSMSKFDEIDREKNPVLTEEKNIELYNKIQDKFENTVFSKRMSLVKYNKKDLSFGDFLKNKKSKFEEIDLEKQCKVLYNIIFNLSNLKEVDLSDIGGSKSTGKCRCKKNITNYKEFKLIQQSITGLYSCEKDLMTI

SEQ ID NO: 204 - protein, 1107 aa, Eubacterium ventriosum
  source 1..1107: note = ATCC 27560
MGYTVGLDIGVASVGVAVLDENDNIVEAVSNIFDEADTSNNKVRRTLREGRRTKRRQKTRIEDFKQLWETSGYIIPHKLHLNIIELRNKGLTELLSLDELYCVLLSMLKHRGISYLEDADDGEKGNAYKKGLAFNEKQLKEKMPCEIQLERMKKYGKYHGEFIIEINDEKEYQSNVFTTKAYKKELEKIFETQRCNGNKINTKFIKKYMEIYERKREYYIGPGNEKSRTDYGIYTTRTDEEGNFIDEKNIFGKLIGKCSVYPEEYRASSASYTAQEFNLLNDLNNLKINNEKLTEFQKKEIVEIIKDASSVNMRKIIKKVIDEDIEQYSGARIDKKGKEIYHTFEIYRKLKKELKTINVDIDSFTREELDKTMDILTLNTERESIVKAFDEQKFVYEENLIKKLIEFRKNNQRLFSGWHSFSYKAMLQLIPVMYKEPKEQMQLLTEMNVFKSKKEKYVNYKYIPENEVVKEIYNPVVVKSIRTTVKILNALIKKYGYPESVVIEMPRDKNSDDEKEKIDMNQKKNQEEYEKILNKIYDEKGIEITNKDYKKQKKLVLKLKLWNEQEGLCLYSGKKIAIEDLLNHPEFFEIDHIIPKSISLDDSRSNKVLVYKTENSIKENDTPYHYLTRINGKWGFDEYKANVLELRRRGKIDDKKVNNLLCMEDITKIDVVKGFINRNLNDTRYASRVVLNEMQSFFESRKYCNTKVKVIRGSLTYQMRQDLHLKKNREESYSHHAVDAMLIAFSQKGYEAYRKIQKDCYDFETGEILDKEKWNKYIDDDEFDDILYKERMNEIRKKIIEAEEKVKYNYKIDKKCNRGLCNQTIYGTREKDGKIHKISSYNIYDDKECNSLKKMINSGKGSDLLMYNNDPKTYRDMLKILETYSSEKNPFVAYNKETGDYFRKYSKNHNGPKVEKVKYYSGQINSCIDISHKYGHAKNSKKVVLVSLNPYRTDVYYDNDTGKYYLVGVKYNHIKCVGNKYVIDSETYNELLRKEGVLNSDENLEDLNSKNITYKFSLYKNDIIQYEKGGEYYTERFLSRIKEQKNLIETKPINKPNFQRKNKKGEWENTRNQIALAKTKYVGKLVTDVLGNCYIVNMEKFSLVVDK

SEQ ID NO: 205 - protein, 1391 aa, Eubacterium yurii
  source 1..1391: note = subsp. margaretiae ATCC 43715
MENKQYYIGLDVGTNSVGWAVTDTSYNLLRAKGKDMWGARLFEKANTAAERRTKRTSRRRSEREKARKAMLKELFADEINRVDPSFFIRLEESKFFLDDRSENNRQRYTLFNDATFTDKDYYEKYKTIFHLRSALINSDEKFDVRLVFLAILNLFSHRGHFLNASLKGDGDIQGMDVFYNDLVESCEYFEIELPRITNIDNFEKILSQKGKSRTKILEELSEELSISKKDKSKYNLIKLISGLEASVVELYNIEDIQDENKKIKIGFRESDYEESSLKVKEIIGDEYFDLVERAKSVHDMGLLSNIIGNSKYLCEARVEAYENHHKDLLKIKELLKKYDKKAYNDMFRKMTDKNYSAYVGSVNSNIAKERRSVDKRKIEDLYKYIEDTALKNIPDDNKDKIEILEKIKLGEFLKKQLTASNGVIPNQLQSRELRAILKKAENYLPFLKEKGEKNLTVSEMIIQLFEFQIPYYVGPLDKNPKKDNKANSWAKIKQGGRILPWNFEDKVDVKGSRKEFIEKMVRKCTYISDEHTLPKQSLLYEKFMVLNEINNIKIDGEKISVEAKQKIYNDLFVKGKKVSQKDIKKELISLNIMDKDSVLSGTDTVCNAYLSSIGKFTGVFKEEINKQSIVDMIEDIIFLKTVYGDEKRFVKEEIVEKYGDEIDKDKIKRILGFKFSNWGNLSKSFLELEGADVGTGEVRSIIQSLWETNFNLMELLSSRFTYMDELEKRVKKLEKPLSEWTIEDLDDMYLSSPVKRMIWQSMKIVDEIQTVIGYAPKRIFVEMTRSEGEKVRTKSRKDRLKELYNGIKEDSKQWVKELDSKDESYFRSKKMYLYYLQKGRCMYSGEVIELDKLMDDNLYDIDHIYPRSFVKDDSLDNLVLVKKEINNRKQNDPITPQIQASCQGFWKILHDQGFMSNEKYSRLTRKTQEFSDEEKLSFINRQIVETGQATKCMAQILQKSMGEDVDVVFSKARLVSEFRHKFELFKSRLINDFHHANDAYLNIVVGNSYFVKFTRNPANFIKDARKNPDNPVYKYHMDRFFERDVKSKSEVAWIGQSEGNSGTIVIVKKTMAKNSPLITKKVEEGHGSITKETIVGVKEIKFGRNKVEKADKTPKKPNLQAYRPIKTSDERLCNILRYGGRTSISISGYCLVEYVKKRKTIRSLEAIPVYLGRKDSLSEEKLLNYFRYNLNDGGKDSVSDIRLCLPFISTNSLVKIDGYLYYLGGKNDDRIQLYNAYQLKMKKEEVEYIRKIEKAVSMSKFDEIDREKNPVLTEEKNIELYNKIQDKFENTVFSKRMSLVKYNKKDLSFGDFLKNKKSKFEEIDLEKQCKVLYNIIFNLSNLKEVDLSDIGGSKSTGKCRCKKNITNYKEFKLIQQSITGLYSCEKDLMTI

SEQ ID NO: 206 - protein, 1142 aa, Facklamia hominis
  source 1..1142: note = CCUG 36813
MYSVGLDIGIASCGYSIINDVNGNIVELGTLLFKSRNSDNNEERRTNRGSRRLINRRRTRLDDGKKLLAEKGFKQDSKLKHVCPYELRVKGLHEKLTQGEIYKVVLHILKKRGISYLDESDENSSGIDGASYKDQVNLNLNLQKELTPGQIQLKRLKENGRIKSGVTFENGYQLNVFSVSAYANELNKILTKQSEYYSEIDQIWIDRFTKNGYRKEAGLVYRKRPYYDGPGNEKNNSIYGRWANFKEDGHPKENIFDQLIGLDSVDSTQVRASASTLTAQKYNLLNDLNNLTIIEDDRKFTTDEKVSIINYLMTQDITRFGPKELAKFYQLEVDQIRGWRIDNKGNPEIHSLKVYRDWKKIFNTSSIDLTSIQTWVVDELANVITLNTEIPSTLATLKIKIPDIDQQILNFVENNFYELKKKTSKNSWHSFSLKTLNILIPELLNTSEEQNTILERLNLKFDLKNKYAEKNQIPVKELLEQIYNPTVTKSVHQSIKLFNEIIEKYGKNNISYVTIEMPRDKNDQDQKDTIKRINKLNSERKNDSEKYFLERSGWDTIRFESALKKPRFAEKLLFYYEQKGKCAYSGQDILAESLLNESCEVDHIIPLSISFDDSIHNKVLVTASSNQEKGQRTPYMAFIDGAKLGQSWDDFVAWVNSCGFHRKKVQNLLYEENIFNPDVQRGFVSRNLNDTRYASRIVLNAIQSFFYKQKDLTKVKVVNGSFTHTLRKKWGSSLDKNRDTYHHHAVDATLCAVTPFINIVKYEFFEEDGIKYMVDLTTGEKVAYSDYKKMKFYDKRAYVPIWDGFIKQLTPANLYPKIKFSHQVDSKWNRKISDATIYSTRKIVETKINKKGVAKETVKDIVIDKIKDIYTPEGWRKFKEKQDKLLMKNFDEKTYNKLIKIAKEYPEKKEVQTSNGKVSLVEVSPFKMYCEEQNVPAIRKYSKKGNGPYIRSLKFYDKELGKHINITKDSYGNDIERTIRNKKIILKNQNSWRTDVYYNSVNNCYELLGIKYCHLKFYRGKYGIPKSIYDELKKEDEISSESVFKFSLYRHDRVRFEKDGEYIEALFGSKNESNKNYLELSPIDKNKWLSKENVKFFGEVAASGRFIKGLKPGIKVIKQSTDYMGHVYAIHQEKLKFVLSDA

SEQ ID NO: 207 - protein, 1512 aa, Fibrobacter succinogenes
MKKILGLDLGTNSIGWAVVNADEITRDDGSRYLKPNGISAAGSRIIPMSADILGDFEKGNSISQTAERTRMRMARRLHERALLRRERLLRVLNLLDFLPKHFADKIDRYGKFTDDSEPKLAWRKNTEGKYEFIFQDAFNEMLAEFKDKQPEIVEEGKKIPYDWTIYYLRKKALEKALSKEELSWILLQFNQKRGYYQLRGEEEEIPQDKKIEYLAQKVVKVEATDQKKGDDVWYNVYLENGMIYRRTSKAPLDWEGKVKEFIVTTEVENDGETPKKDKEGNIKRSFRAPKEDDWTLLKKKTEADIENSHKTVGCYIYDSLLNNPKQKIIGKLVRTVERKFYKEELTQILKKQVELIPELRDDNLYKQCIEELYPINEAHRNTIAKTDFANLFINDILFYQRPLKSKKSQIDNCPYEERIFIDSKTGEKKKVPVKCIAKSNPLFQEFRLWQFIQNLRIYQREKEIDGKLLTDIDITSECLKSEEDYVRLFDWLNDRETIEQEDLLKHLFNTKKSKNKENPYRWNYVEDKVYPCNETRATILKGFSKCGINASVLSPELEMALWHILYSVEDKKEIETALTHFAQKQGWNDDFAKVFSKAKPFKKDYGSYSEKAIKKLLSLMRMGKYWNQDNIDKNTLDRIDKIINGEYDEKISNRVRDNAINLKDISDFRGLPVWLACYIVYDRHSEAKDCTKWNSPEEIDSYLKKFKQHSLRNPIVEQVVTETLRTVRDIWIQEEQIDEIHLELGRDLKNPADKRKKMSENILKNENTNLRIKAMLMEFMNPSMGIENVRPYSPSQQDILRIYEENALDNLTKDDKDFDFISKISKQAQPSKTDIIRYKCWLEQKYRSPYTGKTISLSKLFTPAYEIEHVIPQSLYFDDSFSNKVICEAEVNKLKDRQLGYKFIAEHHGEKVQLSQGEVVEILSVDAYEKFVKENYANNRIKMKKLLMESIPDEFIERQLNDSRYISKVVKGLLSNIVREKIDDENYEPEAVSKNLISCNGAITDRLKKDWGMNDVWNSIILPRFIRMNQITGKDCFTTTNAEGHLIPQMPLELQKGFNKKRIDHRHHAMDAIVIACTTRDHVNLLNNEAAHSKFNATRYQLQRKLRRFEKAVIDGKEREVAKEFLKPWDSFSSDSKNILENIIVSFKQNQRVINKTTNAFLHFDENGKKTFIKQGKGDSWAIRKSMHKDTVFGEINLRKVRSVSLNEAIKVPERVLNKKIKEKILELKNNKIDAKNIKKYIEENHTGGYGIDSSKIDVFYFTKETKERFFATRKTLDTSFNQAKIKDSIADSGIQKILLAHLKSKNGDAEQAFSPDGIDEMNKNIVELNNGKFHQPILKVRVYEKADKFAVGQKGNKKVKFVEAAKGTNLFFAIFEKDGKRSYLTIPLNVMIDCQKQYGNQWKNNIEAYLKEKELVEKDVKLQFILSPNDLVYLPTEGSIDKKRIYKVVSFTNNRLYAIPYAIAKSIVDKNEFTQLNKIEFTDNKESIKDACVPVIIDRLGNVIEFNGKRL

SEQ ID NO: 208 - protein, 1365 aa, Filifactor alocis
MTKEYYLGLDVGTNSVGWAVTDSQYNLCKFKKKDMWGIRLFESANTAKDRRLQRGNRRRLERKKQRIDLLQEIFSPEICKIDPTFFIRLNESRLHLEDKSNDFKYPLFIEKDYSDIEYYKEFPTIFHLRKHLIESEEKQDIRLIYLALHNIIKTRGHFLIDGDLQSAKQLRPILDTFLLSLQEEQNLSVSLSENQKDEYEEILKNRSIAKSEKVKKLKNLFEISDELEKEEKKAQSAVIENFCKFIVGNKGDVCKFLRVSKEELEIDSFSFSEGKYEDDIVKNLEEKVPEKVYLFEQMKAMYDWNILVDILETEEYISFAKVKQYEKHKTNLRLLRDIILKYCTKDEYNRMFNDEKEAGSYTAYVGKLKKNNKKYWIEKKRNPEEFYKSLGKLLDKIEPLKEDLEVLTMMIEECKNHTLLPIQKNKDNGVIPHQVHEVELKKILENAKKYYSFLTETDKDGYSVVQKIESIFRFRIPYYVGPLSTRHQEKGSNVWMVRKPGREDRIYPWNMEEIIDFEKSNENFITRMTNKCTYLIGEDVLPKHSLLYSKYMVLNELNNVKVRGKKLPTSLKQKVFEDLFENKSKVTGKNLLEYLQIQDKDIQIDDLSGFDKDFKTSLKSYLDFKKQIFGEEIEKESIQNMIEDIIKWITIYGNDKEMLKRVIRANYSNQLTEEQMKKITGFQYSGWGNFSKMFLKGISGSDVSTGETFDIITAMWETDNNLMQILSKKFTFMDNVEDFNSGKVGKIDKITYDSTVKEMFLSPENKRAVWQTIQVAEEIKKVMGCEPKKIFIEMARGGEKVKKRTKSRKAQLLELYAACEEDCRELIKEIEDRDERDFNSMKLFLYYTQFGKCMYSGDDIDINELIRGNSKWDRDHIYPQSKIKDDSIDNLVLVNKTYNAKKSNELLSEDIQKKMHSFWLSLLNKKLITKSKYDRLTRKGDFTDEELSGFIARQLVETRQSTKAIADIFKQIYSSEVVYVKSSLVSDFRKKPLNYLKSRRVNDYHHAKDAYLNIVVGNVYNKKFTSNPIQWMKKNRDTNYSLNKVFEHDVVINGEVIWEKCTYHEDTNTYDGGTLDRIRKIVERDNILYTEYAYCEKGELFNATIQNKNGNSTVSLKKGLDVKKYGGYFSANTSYFSLIEFEDKKGDRARHIIGVPIYIANMLEHSPSAFLEYCEQKGYQNVRILVEKIKKNSLLIINGYPLRIRGENEVDTSFKRAIQLKLDQKNYELVRNIEKFLEKYVEKKGNYPIDENRDHITHEKMNQLYEVLLSKMKKFNKKGMADPSDRIEKSKPKFIKLEDLIDKINVINKMLNLLRCDNDTKADLSLIELPKNAGSFVVKKNTIGKSKIILVNQSVTGLYENRREL

SEQ ID NO: 209 - protein, 1347 aa, Finegoldia magna
  source 1..1347: note = ACS-171-V-Col3
MKSEKKYYIGLDVGTNSVGWAVTDEFYNILRAKGKDLWGVRLFEKAKTAADTRTFRSGRRRNDRKGMRLQILREIFEDEIKKVDKDFYDRLDESKFWAEDKKVSGKYSLFNDKNFSDKQYFEKFPTIFHLRKYLMEEHGKVDIRYYFLAINQMMKRRGHFLIDGQISHVTDDKPLKEQLILLINDLLKIELEEELMDSIFEILADVNEKRTDKKNNLKELIKGQDFNKQEGNILNSIFESIVTGKAKIKNIISDEDILEKIKEDNKEDFVLTGDSYEENLQYFEEVLQENITLFNTLKSTYDFVILQSILKGKSTLSDAQVERYDEHKKDLEILKKVIKKYDEDGKLFKQVFKEDNGNGYVSYIGYYLNKNKKITAKKKISNIEFTKYVKGILEKQCDCEDEAVKYLLGKIEQENFLLKQISSINSVIPHQIHLFELDKILENLAKNYPSFNNKKEEFTKIEKIRKTFTFRIPYYVGPLNDYHKNNGGNAWIFRNKGEKIRPWNFEKIVDLHKSEEEFIKRMLNQCTYLPEETVLPKSSILYSEYMVLNELNNLRIKGKPLDTDVKLKLIEELFKKKTKVTLKSIRDYMIRNNFADKEDFDNSEKNLEIVSNMKSYIDFNNILGDKFELEMVEDLIEKITIHTGNKTLLKKYIEETYPDLSSSQIQKIINLKYKDWGRLSRKLLDGIKGRNKTDDVNTVINFMRNSSDNLMQIIEGKNYSFNEYIDNLRKKYIPQEISYEVVENLYVSPSVKKMIWQVIRVTEEITKVMGYDPDKIFIEMAKSEEEKKTTISRKNKLLDLYKAIKKDERDSQYEKLLTGLNKLDESELRSKKLYLYYTQMGRDMYTGEKIDLDKLFDSTHYDKDHIIPQSMKKDDSIINNLVLVNKNANQTTKGNIYPVPSSIRNNPDIYNYWKYLMEKEFISKEKYNRLIRNTPLTNEELGVFINRQLVETRQSTKAIKELFEKFYQKSKIIPVKASLASDLRKDMNTLKSREVNDLHHAHDAFLNIVAGDVWNREFTSNPINYVNENREGDKVKYSLSKYFTRPRKSKGKVIWTPEKGRKLIVDTLNKPSVLISNESHVKKGELFNATISGKKDYKKGKIYLPLKKDDRLKDVSKYGGYKAINGAFFFLVEHTKSKKRIRSIELFPLHLLSKFYEDKNTVLDYAINVLQLQDPKIIIDKINYRTEIIIDNFSYLISTKSNDGSITVKPNEQMYWRVDEISNLKKIENKYKKDAILTEEDRKIMESYIDKIYQQFKAGKYKNRRTTDTIIEKYEIIDLDTLDNKQLYQLLVAFISLSYKTSNNAVDFTVIGLGTECGKPRITNLPDNTYLVYKSITGIYEKRIRIK

SEQ ID NO: 210 - protein, 1348 aa, Finegoldia magna
MKSEKKYYIGLDVGTNSVGWAVTDEFYNILRAKGKDLWGVRLFEKADTAANTRIFRSGRRRNDRKGMRLQILREIFEDEIKKVDKDFYDRLDESKFWAEDKKVSGKYSLFNDKNFSDKQYFEKFPTIFHLRKYLMEEHGKVDIRYYFLAINQMMKRRGHFLIDGQISHVTDDKPLKEQLILLINDLLKIELEEELMDSIFEILADVNEKRTDKKNNLKELIKGQDFNKQEGNILNSIFESIVTGKAKIKNIISDEDILEKIKEDNKEDFVLTGDSYEENLQYFEEVLQENITLFNTLKSTYDFLILQSILKGKSTLSDAQVERYDEHKKDLEILKKVIKKYDEDGKLFKQVFKEDNGNGYVSYIGYYLNKNKKITAKKKISNIEFTKYVKGILEKQCDCEDEDVKYLLGKIEQENFLLKQISSINSVIPHQIHLFELDKILENLAKNYPSFNNKKEEFTKIEKIRKTFTFRIPYYVGPLNDYHKNNGGNAWIFRNKGEKIRPWNFEKIVDLHKSEEEFIKRMLNQCTYLPEETVLPKSSILYSEYMVLNELNNLRINGKPLDTDVKLKLIEELFKKKTKVTLKSIRDYMVRNNFADKEDFDNSEKNLEIASNMKSYIDFNNILEDKFDVEMVEDLIEKITIHTGNKKLLKKYIEETYPDLSSSQIQKIINLKYKDWGRLSRKLLDGIKGTKKETEKTDTVINFLRNSSDNLMQIIGSQNYSFNEYIDKLRKKYIPQEISYEVVENLYVSPSVKKMIWQVIRVTEEITKVMGYDPDKIFIEMAKSEEEKKTTISRKNKLLDLYKAIKKDERDSQYEKLLTGLNKLDDSDLRSRKLYLYYTQMGRDMYTGEKIDLDKLFDSTHYDKDHIIPQSMKKDDSIINNLVLVNKNANQTTKGNIYPVPSSIRNNPKIYNYWKYLMEKEFISKEKYNRLIRNTPLTNEELGGFINRQLVETRQSTKAIKELFEKFYQKSKIIPVKASLASDLRKDMNTLKSREVNDLHHAHDAFLNIVAGDVWNREFTSNPINYVKENREGDKVKYSLSKDFTRPRKSKGKVIWTPEKGRKLIVDTLNKPSVLISNESHVKKGELFNATIAGKKDYKKGKIYLPLKKDDRLQDVSKYGGYKAINGAFFFLVEHTKSKKRIRSIELFPLHLLSKFYEDKNTVLDYAINVLQLQDPKIIIDKINYRTEIIIDNFSYLISTKSNDGSITVKPNEQMYWRVDEISNLKKIENKYKKDAILTEEDRKIMESYIDKIYQQFKAGKYKNRRTTDTIIEKYEIIDLDTLDNKQLYQLLVAFISLSYKTSNNAVDFTVIGLGTECGKPRITNLPDNTYLVYKSITGIYEKRIRIK

SEQ ID NO: 211 - protein, 1348 aa, Finegoldia magna
  source 1..1348: note = SY403409CC001050417
MKSEKKYYIGLDVGTNSVGWAVTDEFYNILRAKGKDLWGVRLFEKAKTAADTRTFRSGRRRNDRKGVRLQILREIFEDEIKKVDKDFYDRLDESKFWAEDKKVSGKYSLFNDKNFSDKQYFEKFPTIFHLRKYLMEEHGKVDIRYYFLAINQMMKRRGHFLIDGQISHVTDDKPLKQQLILLINDLLKIELEEEFMDSIFEILADVNEKKTEKKNILKELINAQDFNKQEGKILYSIFESIVTGKAKIKNIISDEDILEKIKEDNKEDFVLTGDSYEENLQYFEEVLQENITLFNTLKSAYDFVILQSILKGKSTLSDAQVERYDEHKKDLEILKKVIKKYDEDGKLFKQVFKEDNGNGYVSYIGYYLNKNKKITAKKKISNIEFTKYVKGILEKQCDCEDEDVKYLLGKIEQENFLLKQISSINSVIPHQIHLFELDKILENLAKYYPSFNNKKEEFTKIEKIRKTFTFRIPYYVGPLNDYHKNNGGNAWIFRNKGEKIRPWNFEKIVDLHKSEEEFIKRMLNQCTYLPEETVLPKSSILYSEYMVLNELNNLRINGKPIDTDVKLKLIEELFKKKTKVTLKSIRDYMIRNNFADKEDFDNSEKNLEIVSNMKSYIDFNNILGDKFELEMVEDLIEKITIHTGNKKLLKKYIEETYPDLSSSQIQKIINLKYKDWGRLSRKLLDGITGTNIETGEIDTVINFLRNSSDNLMQIIGSQNYSFNNDIDKLRKKYIPQEISYEVVENLYVSPSVKKMIWQVIRITEEITKVMGYDPDKIFIEMAKSEEGKKTTISRKNKLLALYKAIKKDERDSQYEKLLTGLNKLDDSDLRSRKLYLYYTQMGRDMYTGEKIDLDKLFDSTHYDKDHIIPQSMKKDDSIINNLVLVNKNANQTTKGNIYPVPSSIRNNPKIYNYWKYLMEKEFISKEKYNRLIRNTPLTNEELGGFINRQLVETRQSTKAIKELFEKFYKKSKIIPVKAILASDLRKDMNTLKSREVNDLHHAHDAFLNIVAGDVWNREFTSNPINYVKENREGDKVKYSLSKYFTRPRKSKGKVIWTPEKGRKLIVDTLNKPSVLISNESHVKKGELFNATIAGKKDYKKGKIYLPLKKDDRLQDVSKYGGYKAINGAFFFLVEHTKSKKRIRSIELFPLHLLSKFYEDKNTVLDYAINVLQLQDPKIIIDKINYRTEIIIDNFSYLISTKSNDGSITVKPNEQMYWRVDEISNLKKIENKYKKDAILTEEDRKIMESYIDKIYQQFKAGKYKNRRTTDTIIEKYEIIDLDTLDNKQLYQLLVAFISLSYKTSNNAVDFTVIGLGTECGKPRITNLPDNTYLVYKSITGIYEKRIRIK

SEQ ID NO: 212 - protein, 1516 aa, Flavobacteriaceae bacterium
  source 1..1516: note = S85
MLKQQKDKIIGMNKKILGLDLGTNSIGWALVKQDLENKYGEIIGCGSRIIPMSQDVLGKFDAGISISQTAERTNYRSVRKLIQRNTLRRERLHRVLHQLDFLPKHYNDSIDFEKKLGQFKTDKETKLNYFVNQHGKHEFLFKDSFNEMVKEFKEEQPELFYIKNNGKETKIPYDWTIYYLRKKALSKKISKEELSWLVLNFNQKRGYYQLRGEIDEEKEKNKRYEKLYVSEVVKTNNTIKKTGEYLYDIYFDNGWKYEKQTTKPQDWLHKHKEFIITTTTLKNGETKRTFKTVDSEKDWIAIKSKTEQDIKESNKTVGAFIYDTLLKNPTQKIRGSLVKTIERKFYREEFEKILKEQIKHRPEINVNTAIGKENYTKCVTELYPRNEAHANNILTNDFNYLFTKDILFYQRPLKSKKSEIANCQYEYRTYIKKKEKTGKEERVKQPLKATPKSHPLFQEFRLWQFIHNLKIYIRETTVGNKPLFDVDITDTFFTSENDWATLFEYLNNKKEIEQKHVLEYLVSKKIISKSEKTDYRWNYVEDKKYPGNETRVDFINRLKKVENLNVDEFLTSELEFKLWHIIYSVTDKNEYEKALENFAIRQNIDKDSFVNSFKKFPPFKSDYGAYSTKAIKKLLPLMRLGKFWDGSEIPKVVVEKITDIKTRLTSVNYDESLFKKDEKKILETIVDDITPKQLLKSFVKLKGKNHLAGLNTYQACYLVYERHSESSDITQWENPDDIDSFLNHFKQHSLRNPIVEQVVTETLRTVRDIWKYYGNGSPNYFNEIHIELGREMKNPADKRKQMSAKINENENTNQRIKGILQELMNDGVQDIKPYSPSQQEILKIYEEGISQNPNVDYSKVSEDEITKIKKSNNPTLKEIQRYKLWLEQKYISPYTGKPIPLSELFTPAYQIEHIIPQSRYFDNSLSNKIICESEVNEDKSNKTAYEYLKTNGGSIVHGHHLLSLKEYEDHCQHYFKKNRTKLKNLLSEEIPEGFINRQLNDSRYISKLIKGLLSNIVREENEQEATSKNIVPVTGSITSKLKQDWGLNDKWNEIIAPRFKRLNKMTNSNDFGYFDEKINTFRIQVPDAISRGFNKKRIDHRHHTLDALVIACCTKKHIQYLNSLNNEIIKHELKPSILIKNAQGDYTKHFMLPWNNFPIDCKNAIENTIVSFKQNLRVINKTSNKYQSYKDENGNLRLGKDGKPKKGLTKQTKGNNWAVRKAMHEDTFYGEIVDGENKGKLKIKTLLDTSFDVKKIEDKVLDKSIRTILINYLKQDKYKNLSKPHEEAFSPNGIIEMNKNIISLNNNIPHKPIKRVTLKHEKGKKFSIKTLLDKKTKFAKSATGTNVFFCIYKNINGKIKYHTPSFEEIIEIQKQEFEIKYKSKLNVPETLFDKKESFELLFYLQPNDLVYLPNDEELKNRQLIDFNNLNKKQIKRIYKFTDGSGTTANFIPYQVAKVIFNLNKKEQAKSSFKYPIQNEFGVGSPQSKNQKSIEGILIKERCIKLKIDRLGNISKA

SEQ ID NO: 213 - protein, 1473 aa, Flavobacterium branchiophilum
MAKILGLDLGTNSIGWAVVERENIDFSLIDKGVRIFSEGVKSEKGIESSRAAERTGYRSARKIKYRRKLRKYETLKVLSLNRMCPLSIEEVEEWKKSGFKDYPLNPEFLKWLSTDEESNVNPYFFRDRASKHKVSLFELGRAFYHIAQRRGFLSNRLDQSAEGILEEHCPKIEAIVEDLISIDEISTNITDYFFETGILDSNEKNGYAKDLDEGDKKLVSLYKSLLAILKKNESDFENCKSEIIERLNKKDVLGKVKGKIKDISQAMLDGNYKTLGQYFYSLYSKEKIRNQYTSREEHYLSEFITICKVQGIDQINEEEKINEKKFDGLAKDLYKAIFFQRPLKSQKGLIGKCSFEKSKSRCAISHPDFEEYRMWTYLNTIKIGTQSDKKLRFLTQDEKLKLVPKFYRKNDFNFDVLAKELIEKGSSFGFYKSSKKNDFFYWFNYKPTDTVAACQVAASLKNAIGEDWKTKSFKYQTINSNKEQVSRTVDYKDLWHLLTVATSDVYLYEFAIDKLGLDEKNAKAFSKTKLKKDFASLSLSAINKILPYLKEGLLYSHAVFVANIENIVDENIWKDEKQRDYIKTQISEIIENYTLEKSRFEIINGLLKEYKSENEDGKRVYYSKEAEQSFENDLKKKLVLFYKSNEIENKEQQETIFNELLPIFIQQLKDYEFIKIQRLDQKVLIFLKGKNETGQIFCTEEKGTAEEKEKKIKNRLKKLYHPSDIEKFKKKIIKDEFGNEKIVLGSPLTPSIKNPMAMRALHQLRKVLNALILEGQIDEKTIIHIEMARELNDANKRKGIQDYQNDNKKFREDAIKEIKKLYFEDCKKEVEPTEDDILRYQLWMEQNRSEIYEEGKNISICDIIGSNPAYDIEHTIPRSRSQDNSQMNKTLCSQRFNREVKKQSMPIELNNHLEILPRIAHWKEEADNLTREIEIISRSIKAAATKEIKDKKIRRRHYLTLKRDYLQGKYDRFIWEEPKVGFKNSQIPDTGIITKYAQAYLKSYFKKVESVKGGMVAEFRKIWGIQESFIDENGMKHYKVKDRSKHTHHTIDAITIACMTKEKYDVLAHAWTLEDQQNKKEARSIIEASKPWKTFKEDLLKIEEEILVSHYTPDNVKKQAKKIVRVRGKKQFVAEVERDVNGKAVPKKAASGKTIYKLDGEGKKLPRLQQGDTIRGSLHQDSIYGAIKNPLNTDEIKYVIRKDLESIKGSDVESIVDEVVKEKIKEAIANKVLLLSSNAQQKNKLVGTVWMNEEKRIAINKVRIYANSVKNPLHIKEHSLLSKSKHVHKQKVYGQNDENYAMAIYELDGKRDFELINIFNLAKLIKQGQGFYPLHKKKEIKGKIVFVPIEKRNKRDVVLKRGQQVVFYDKEVENPKDISEIVDFKGRIYIIEGLSIQRIVRPSGKVDEYGVIMLRYFKEARKADDIKQDNFKPDGVFKLGENKPTRKMNHNQFTAFVEGIDFKVLPSGKFEKI

SEQ ID NO: 214 - protein, 1459 aa, Flavobacterium columnare
MKFNLGLDIGTNSIGWALVNEDYENKKGKIIAAGSRIIPMTQDILDKFGSGAITETQTALRTDYRSKRKLIQRFLLRRERLHRVLNVLDFLPKHYAESIDFEKYFGKFLPNTEPKLAYNQNQFIFQNSFLEMLKEFQEKHPELLTNNKKIPYDWTIYYLRKKALNQRIEKEELAWLLLQFNQKRGYNQLRDEEEESVPNKQVEFYSLKIIDVVADQPKEGRDKRWYSINLENGWTYRRESKTPLFNWEGKTKDFIVTTDLNQDGSIKKDKEGKEKRSFRAPSEGDWTLLKKKTEKEIYESGKTLGTYIYDALLNTPDLKIKGDFIRTIDRSIYKEELQQIINKQKEYHLELNSSKLYKACLEELYPKNEIYKSALKNKDIAYLFINDILYYQRPLKAPKYNIGKCTYESRTFKKEDKKIREYIPAVAKSHPLFQEFRLWQWIKNLKIYEKLSSDNCTDFFLTNEQDFENLFEFLWNKKEIDHKGILEYLVKTKFPDLKPKQVKTKVKEYRWNYVYDHEKDESKTYPCGETYFLLKNKLDKIYNAQDDFLDKERLYNLWHIIYSVTDKKQYEKALAKFALKNHLDTKSFVNTFKRIPPFKNDYAIYSLKAIKKLLPLMRVGKYWNYDDIDPITKQKIQCIITGEENDTISTLVREKTNHFSNENDFKNLPLWLAGYIVYNSHNESSEIEKWKSPQDIDTFLKKFKQHALRNPIVEQVVTETLRVVRDIWSKKGQGKKDFFNEIHIELGKDLKNPVDKRRKLSSTNTKNESTNTRIKALLIELFTQGVENVKPNSPKHQEILKIFEEGALNSGIEIEEDIIKISNTDQPTKKQLELYILWLEHKYKSPYTGQSIPLSKLFTPNYEIEHIIPRSKYYDDNLSNKVICETEINRLKNNQLGYEFINNHEIREVTLEEGKTIRLLSPEQYWNFVTTYYAKNKAKRENLLLKELPVQMVEKQLNDTRYVSKYVMQLLSKIVRKEDGTDNGINSTNILSISGKMTRALKNDWDLNDVWNDLLLYRFERLNTITKTNLFTTYSEQKQKRMPIVPDQYAKGFHKKRLDHRHHALDAIVIACITRNHINYMNNQNIQGEKLKKNAIEKENYREILQKSRLDIRAQLCEKKYNDNDPTKYNWVFIKPWADFTENTKDILESIIPSFKQNLRIINKTVNYYEKYNENGKKVKVRQIKGDNWAIRKPLHKETISGKVHLSYKTPAKGKILTATRKVLDSSMDFKSIEKITDTGIQKILKNYLEYKKSPELAFSPEGIEELNATITKYNNGFHHKPIYKVRIYEEGVKFPLGNKGNKKSKYVEAEKGTNLFFAIYKDQENNRYFETIPFNDVLETLKKGMSAVPEKNQEENTLVFALSPQDLVFVPTLDEIENPDIVDFKNLTKDQTNRIYKMVSSSGKQCFFIKAEVATSIVNKMEFSTSNKMENSIEGIQIKSNCWKLKLDRLGTITRVIK

SEQ ID NO: 215 - protein, 1535 aa, Flavobacterium columnare
MTKILGLDLGTNSIGWAIRDTENEGINQILDKGARIFSEGVKSENGKEISRAAERTAYRSARKIKYRRKLRKYETLKVLSINGMCPLSVEEVEQWKKSGFKEYPLNPEFLDWLRTNEDKNINPYLFRDKASKQKVTLFELGRALYHIAQRRGFLSNRLDQSAEGVFEEHNPQIQNLIEDLDSSNTILNELKEYYINLGIIDETEKSGFKKDLDEGEKKLKSLYNSLVAITKKNANDIETCKQELIARLNKKEDLGKVKGKIKDISQAMLDRNFKTLGQYFFSLYNKERIRNQYTSREEHYLEEFIIICQTQGIEGINTNEKLPEKKFTGLAKDLYRAIFFQRPLKSQKGLIGKCSFEKNKSRCAVSHPDYEEFRMWSYLNTIKIGTQSEKTLRFLTLEEKLKLVPKFYRKSDFNFEVLAKELVEKGASFGYYKSSKKNEFFYWFNYKPTDSVSACVVSASLENAIGKDWKIKTFEYQTRNTEKNEVTKSVDYKDLWHLLSVATSDTYLYDFAIEKLKLEPKNAKAFSKTKLKKDFASLSLAAIAKILPYLKQGLLYSHAVFMANIENIVDADIWKDEEQQKFIQSKIVELVDNYIVEKSKLELINGLLKIYNTEDKEGRKVYYSKEAESLFEADLRKKLVPFYKANIIIEEHEQEIIFQDLFPILMDQLKKQEFIKIGRLDKQIEAFLEGENEEGQIFCNHTDKLKKLYHPSDIEVFKKKTIKDEWGNEKVVLGSPLTTSIKNPMAMRALHQLRKVLNTLIANDQIDEDTRIHIEMARELNDANKRKGIQDFQNENKKFREEAIKEIKKLYLEECHKDVNPTEDDILRYQLWLEQGKCEIYEEGNNISICDIIGSNPSYDIEHTIPRSISQDNSQMNKTLCSLKFNRSIKKQKMPVELSNYNDILPRIAHWKKEAEELTRQIETISRSIKSAATKVAKDKNIRKRHYLTLKRDYILGKYERFTWEEPKVGFKNSQIPDTGIITKYAQAYLKSYFKRVESVKGGAVAEFRKLWGIQESFIDENWWKHYKDKDRDKHTHHTIDAITIACMPKDKYDLLAHAWRLEDEQDKKAAKVLIEQAKPWKTFKEDIEKIETEILVSHFTPDNVKKQSKSIIKNRGKKVYVLKNELPVNFKNKIEGKDYFKLKFDSKILYKIPKKKEKQTDTFYEELPKNYLNGVEGKDYFKINTTGKTFYKIPIFNQGDTIRGSLHQETTYGAIKLPDIDIETKKPLHTDKGGFILKKDIKGNEIVFFVVRKEISKISENDVQNIVDNVVRKKIENAIANSLITFKIVKKKKVAVIKEGVTIWMREPNIEKGIEGIPIKKVRIITNSVKNPIEIKVHSPLSKSRHKHKQKVYGQNDENYAMALYELDGKREFELINNFNLAKLLKQSQSYYPLHKEKEIKGKKILVPIEKRNNKDVILKRGQQVVFYDKTVENPKDISEIIDFRERIYIIEGLTIQRQKDKKTSKVNEYGIIQLRHFKEARKSEEISKDNFKPDGEFKINENKPTRKMNHNQFTAFVEGIDFKVLPSGKFQKI

SEQ ID NO: 216 - protein, 1354 aa, Flavobacterium psychrophilum
  source 1..1354: note = JIP02/86
MKKILGLDLGTNSIGWAFINEAENEIEVSSIVNTGVRIVPLTTDEESDFKKGNTISINADRTLKRGARRGLQRFKQRREALLETFNRIKFIATDFVYAETGAATTFSSYQLRAKSAVEAVTKEELVKVLLMLNKKRGYKSSRKAKTAEEGDAIDGMKIAKEIFENNLTPGQWVYNSLSKGGKFIPDFYHSDLQKELEKIVRFQNQFHSEQINDKLLADIQGKSRTQTSQHFSKTLNIPLAENKGTREETKLQHYQWRNEALANELDMKILAFIITEINNQINQSSGYLGAISDRSKELYFNQETVGQYQYKQLQENVHAKLKNQVFYRQDYLDEFEKIWETQAKFHSELNEKLKAEIRDITIFYQRKLKSQKHLVSFCEFEKGHKAIPKSSPLFQEFRIWQNLNNVVVKNETTKEVFELSEELKQLIAEELQFKESMTDVQMLTFCELKKGTHTVNFKKIEGNRTNTSIYKAFEKILEVEGYEIDFSKMKPLEIKETVAPIFETLNINTVILDFDPTIQGNDFDKQPYYQLWHLLYSAEDDDKLKETLKTKFGFKENHLPFILNINLQADYGSLSAKAIKKILPHLMDGHIYDKACLMVGYNHSSSLTTAQNNDRVLKDTLELLKKNSLRNPVVEKILNQMINVINAIMKDPAMGKPDEIRVELARELKANNEQRKKATSDINTATTEHERIRKLLHSEFNIPRVTRNDIIRYKLWLETGGISLYTGNPIKASDLFSKNYDIEHIIPKSRLFDDSFSNKTLCERQLNIDKSNKTAYSFLQEKLSENDFAAYENRVKDLFKTGKIKSYTKYKKLLMADNEIPEGFIDRQLRETQYIAKKAKEILLEVSRNVTATIGSVTDKLRQDWELVDVMKELNWEKYDKLGLTHIEEGKNGERLSKIKDWTKRNDHRHHAMDAITVAFTKPAYIQYLNNLNAKTQGENKANSIIGIENKHLYRDKNNKLRFISPMKNFREEAKKQLESILISYKAKNKVVTKNKNTTKKSGGTNQKIQLTPRGRLHKETVYGKLQQYATKEEKVNASFTEDYIQKVAKKEYREALLKRLEENDNDPKKAFTGKNALNKTPIYISLKDNIIVPEKVKTVWLETDYTIRKDITPDLKIDKVIDVGIKRILQNRLNEFNGDPKKAFVNLGESPIWLNKEKGIAIKRVTISGVSNAQALHTKKDHLGNEILDKNGNPIPVDFISTGNNHHVAIYRDEKGNLQEEVVSFYDAVIRRNLGLSVINKNHEKGWEFLFSMKQNEFFIFPSDGFNPHEIDLLNPNNYHLISPNIFRVQKISTKNYMFNHHLETKAVDGEMLKSKKELSKTSYHFIQTPTNLNGIIKVRINHLGKIVHLGEY

SEQ ID NO: 217 - protein, 1458 aa, Fluviicola taffensis
MTKTILGLDLGTNSIGWALINQDFDNKKGEILGMGSRIIPMTQDIKDEFGKGNSISQTAERTRLRGVRRLIHRTLLRRERLHRVLNIIGFLPEHYANQIDFEKRFGKFKPESEPKISFDGNDVFLFEKSYQEMLVDFKIHQPQLVSNGKKIPHDWTIYYLRKKALSKKIEKEELAWILLNFNQKRGYYQLRGEEEEETPNKLVEFHSLKIVEVNADEPQKGKPEIWYSLVLENGWVYRRASKTPLFDWKDKIREFIVTTEINNDGTVKTDKEGTEKRSFRAPKPEDWTLQKKKTEFELSKSGNEVGAFIYESILQKPNQKIRGKLISTIERKFYKEELKTILKTQLFFHKELKDEKLYNACIEELYKNNEAHRSLLSNKGFEHLFINDILFYQRPLRSKKSQISNCPLEKRTYKKEGIEITEGIKVISKSNPIYQEFRLWQWISNLSLYCIEPTETNVTSTFLNSIEDYENLFEFLNNRKEIEQKHLLKYLLENQGFKGKLLTNELEKFRWNFVADKKYPCNETGSLLHTRLSKVKNISPDFLTKEIEHQLWHIIYSVTDKIEYEQALKTFARKNNLDVDSFFEHFKKIPPFESTYGAYSEKAIKKLLPLIRLGKYWNWEAIDSISKDRISKILSGEYDENIKNRVREKAVHLTSENNFQGLQEWLAKYIVYDRHSEGNDLGKWTSVSDLETYLKEFKQHSLRNPIVEQVITETLRVVKDIWIKHGKGTENFFDEIHVELGREMKNNSEDRKRLTNTITENENTNLRIKALLMEMMNDNDVENVRPYSPSQQEILKIYEDGALNSNIELDDEIVKISKKAEPTKSELQRYKLWLEQKYRSPYTGQVIPLNKLFTSEYEIEHVVPQSRFFDDSFSNKVICESAVNKRKDNQLGLQFIKNHSGEKVELGFGKVVQVFTEEQYLDFVKEHYSKNRSKHNKLLLEEIPEKMIERQLNDTRYISKFVSSILSNIVRSEKDDDGLNSKNILPGNGKITTELKRDWGLNDVWNDLILPRFERMNTITNSDLFTTYNDKYQKHLPTVPFEYSKGFQKKRIDHRHHAMDALVIACATRDHLNLMNNQSAKSELKRYDLQNKLRKKEPYFNQKENKQKEAFKDFIKPWGTFTEDSKNALEKIIISFKQNLRVINKATNSYESYKDEDGNLRIGKDGKPEKGLIKQKGLNWAIRKPLHKDTVSGQINLSRIKLPNGKILTATRKNLDTSFDLKTIENSITDTGIQKILKNYLLSKESPELAFSPEGLEEMNNEIEKYNNGKFHHPINKARIYELGSKFNVGQTGNRRDKFVEAAKGTNLFFAIYQDENKNRSYETIPLNEVIEHQKWRASLPKEEQEKIPLVPVNKLKGTFIFSLSPNDLVYVPSNDELERSASIDFSKLKKEQINRLYKMVSSSGSQCFFVKSEVATSVVNKMEYSSLNKMEKSIDNLMVKEICIKLKIDRLGNISKA

SEQ ID NO: 218 - protein, 1646 aa, Francisella tularensis
MNIKILPIAIDLGAKNTGVFSAFYQKGTSLESLDNKNGKVYELSKDSYTLLMNNRTARRHQRRGIDRKQLVKRLFKLIWTKQLNLEWNKDTQQTISFLLNRRGFSFITDGYSPEYLNIAPEAVKAILMSILDDYNGEDDLDSYLQSATENDSKIDELYNKLLQKALEFKLRKLCIDIKEDKVTTKTLKELSNTEFKLLANYLVDYDRILRTQKFSYTDKQGNLRELNYYHHDKYNIQEFLKRNIIINDVILEKLTDDLDIWNLNFDKFDFEKNLEKLENQEDKDYLQTHLHHFVFAVNKIKSEMASGGRHRSQYFQEITNVLVENNHQEGYLKNFCENLHNKKYSNLSVKNLVNLIGNLSNLELKPLRKYFNDKIHAKADYWDEQKFAETYSDWILGEWRVGAKDKDKKDGAKYSYKNLCDELKQKVGINQDGIINQTKSDFVDFLLELDPCRTIPPYLDNNNRKPPKCQSLILNPKFLDNKYPNWQQYLQELKKLQTVQNYLGNFEIDLKDLKSSKEQPYFVKYKSLNQQIASGQRDYKDLDARVLQFIFDRVKASDELLLNEIYSHAKKLKQNTSSELEKLELCKKLDEVIANSQLSQILKSQHVNGIFEQGTFLHLVCKYYKQRQRARDSRLYIMPEYRYDKKLDKYNNTGRFDDDNQLLTYCNHKPRQKRYQLLNDLAGVLQVSPNFLKDKIGSDDDLFISKWLVEHIRGFKKACEDSLKIQKDNRGLLNHKINIARNTKGKCEKEIFNLICKIEGSEDKKGNYKHGLAYELGVLLFGEPNQASKLEFDRKIKKFNSIYSFAQIQQIAFAERKGNANTCAVCSADNAHRMQQIKVAKPVEGNKDNIILSAKAQRLPAIPTRIVDGAVKKIATILARNIVDDNWDNIKQALSNNQQLHVPIITESNAFEFEPALADIKGKSLKDKRKKALERIDPENVFKDKNNRIKEFAKGISAYSDANLANGDFDGAKEELDHIIPRSHKKYGTLNDEANLICVTREDNQNRGNKAVFLYDLKPNYKLKQFNTTDDLEIEKKIADTIWDASKQDFKFGNYRSFINLTPQEQIAFRHALFLADKNPIKKAVIRAIDNRNRTFVNGTQRYFAEVLANNIYLRAKKENLATNRITFDYFGIETTNSNGRGIADVRKLYEKVDSDIQAYAKGDKPQDSYSHLIDAMIAFCVAADEHKNEGSIGLKMGNQYGLFPTPDKYDENTGEIISWHNDDIFRKIKVSDNQFSDKKLVRKKATEGFNTHRQMTRDGIYGESYLPILIHKNLNEVRKGYNWENSEEIKIFKGKKYDIQQLNNLVYCLKFVDKPISIDIQITTLEELRNILETNNISTTAEYYYINLKTQKLHEYYIENYNTALGYKKYTKEMEFLRSLAYRTERVKIKSIDDVSMILAKDSNFKAGKIELPFKTEWQRLYLEWQNTTIKDNHEFLKSYFSVKNATKQHKKVRKDFSLPISTNEGKLLVKRKTWDNNFIYQILNDSDSRADGTKPFIPAFDISKNEIVETIIKSFTSKNIFWLPKNIELQKVDNKSIFAIDTSRWFEVETPKDLIEIGVSTIQYKIDNNSRPKVRVKLDYVMDDDSKINYFMNHSLLKSRYPDKVLEILKQSTIIEFESSGFNKTIKEMLGMTLAGIYNETSNN

SEQ ID NO: 219 - protein, 1629 aa, Francisella tularensis
MNFKILPIAIDLGVKNTGVFSAFYQKGTSLERLDNKNGKVYELSKDSYTLLMNNRTARRHQRRGIDRKQLVKRLFKLIWTEQLNLEWDKDTQQAISFLFNRRGFSFITDGYSPEYLNIVPEQVKAILMDIFDDYNGEDDLDSYLKLATEQESKISEIYNKLMQKILEFKLRKLCTDIKDDKVSTKTLKEITSYEFELLADYLANYSEILKTQKFSYTDKQGNLKELSYYHHDKYNIQEFLKRHATINIQILDTLLTDDLDIWNFNFEKFDFDKNEEKLQNQEDKDHIQAHLHHFVFAVNKIKSEMASGGRHRSQYFQEITNVLDENNHQEGYLKNFCENLHNKKYSNLSVKNLVNLIGNLSNLELKPLRKYFNDKIHAKADHWDEQKFTETYCHWILGEWRVGVKDQDKKDGAKYSYKDLCNELKQKVTKAGLVDFLLELDPCRTIPPYLDNNNRKPPKCQSLILNPKFLDNQYPNWQQYLQELKKLQSIQNYLESFETDLKVLKSSKDQPYFVEYRSSNQQIASGQRDYKDLDARILQFIFDRVKASDELLLNEIYFQAKKLKQKASSELEKLESSKKLDEVIANSQLSQILKSQHTNGIFEQGTFLHLVCKYYKQRQRARDSRLYIMPEYRYDKKLHKYNNTGRFDDDNQLLTYCNHKPRQKRYQLLNDLAGVLQVSPNFLKDKIGSDDDLFISKWLVEHIRGFKKACEDSLKIQKDNRGLLNHKINIARNTKGKCEKEIFNLICKIEGSEDKKGNYKHGLAYELGVLLFGEPNEASKPEFDRKIKKFNSIYSFAQIQQIAFAERKGNANTCAVCSADNAHRMQQIKITEPVEDNKDKIILSAKAQRLPAITTRIVDGAVKKMATILAKNIVDDNWQNIKQVLSAKHQLHIPIITESNAFEFEPALADVKGKSLKDRRKKALERISPENIFKDKNNRIKEFAKGISAYSGANLTDGDFDGAKEELDHIIPRSHKKYGTLNDEANLICVTRGDNKNKGNRIFCLRDLANNYKLKQFETTDDLEIEKKIADTIWDANKKDFKFGNYRSFINLTPQEQKAFRHALFLADENPIKQAVIRAINNRNRTFVNGTQRYFAEVLANNIYLRAKKENLNTDKISFDYFGIPTIGNGRGIAEIRQLYEKVDSDIQAYAKGDKPQASYSHLIDAMLAFCIAADEHRNDGSIGLEIDKNYSLYPLDKNTGEVFTKDIFSQIKITDNEFSDKKLVRKKATEGFNTHRQMTRDGIYAENYLPILIHKELDEVRKGYTWKNSEEIKIFKGKKYDIQQLNNLLYCLKFVDKPISIDIQISTLEELRNILTTNNIAATAEYYYINLKTQKLHEYYIENYNTALGYKKYTKEMEFLRSLAYRSERVKIKSIDDVKQVLDKDSNFIIGKITLPFKKEWQRLYREWQNITIKDDYEFLKSFFNVKSITKLHKKVRKDFSLPISTNEGKFLVKRKTWDNNFIYQILNDSDSRVDGTKPFIPAFDISKNEIVEAIIDSFTSKNIFWLPKNIELQKVDNKNIFAIDTSKWFEVETPSDLRDIGVATIQYKIDNNSRPKVRVKLDYVIDDDSKINYFTNHSLLKSRYPDKVLEILKQSTIIEFESSGFNKTIKEMLGMTLAGIYNETSNN

SEQ ID NO: 220 - protein, 1629 aa, Francisella tularensis
  source 1..1629: note = subsp. novicida (strain FTG)
MNFKILPIAIDLGVKNTGVFSAFYQKGTSLERLDNKNGKVYELSKDSYTLLMNNRTARRHQRRGIDRKQLVKRLFKLIWTEQLNLEWDKDTQQAISFLFNRRGFSFITDGYSPEYLNIVPEQVKAILMDIFDDYNGEDDLDSYLKLATEQESKISEIYNKLMQKILEFKLMKLCTDIKDDKVSTKTLKEITSYEFELLADYLANYSESLKTQKFSYTDKQGNLKELSYYHHDKYNIQEFLKRHATINDRILDTLLTDDLDIWNFNFEKFDFDKNEEKLQNQEDKDHIQAHLHHFVFAVNKIKSEMASGGRHRSQYFQEITNVLDENNHQEGYLKNFCENLHNKKYSNLSVKNLVNLIGNLSNLELKPLRKYFNDKIHAKADHWDEQKFTETYCHWILGEWRVGVKDQDKKDGAKYSYKDLCNELKQKVTKAGLVDFLLELDPCRTIPPYLDNNNRKPPKCQSLILNPKFLDNQYPNWQQYLQELKKLQSIQNYLDSFETDLKVLKSSKDQPYFVEYKSSNQQIASGQRDYKDLDARILQFIFDRVKASDELLLNEIYFQAKKLKQKASSELEKLESSKKLDEVIANSQLSQILKSQHTNGIFEQGTFLHLVCKYYKQRQRARDSRLYIMPEYRYDKKLHKYNNTGRFDDDNQLLTYCNHKPRQKRYQLLNDLAGVLQVSPNFLKDKIGSDDDLFISKWLVEHIRGFKKACEDSLKIQKDNRGLLNHKINIARNTKGKCEKEIFNLICKIEGSEDKKGNYKHGLAYELGVLLFGEPNEASKPEFDRKIKKFNSIYSFAQIQQIAFAERKGNANTCAVCSADNAHRMQQIKITEPVEDNKDKIILSAKAQRLPAIPTRIVDGAVKKMATILAKNIVDDNWQNIKQVLSAKHQLHIPIITESNAFEFEPALADVKGKSLKDRRKKALERISPENIFKDKNNRIKEFAKGISAYSGANLTDGDFDGAKEELDHIIPRSHKKYGTLNDEANLICVTRGDNKNKGNRIFCLRDLADNYKLKQFETTDDLEIEKKIADTIWDANKKDFKFGNYRSFINLTPQEQKAFRHALFLADENPIKQAVIRAINNRNRTFVNGTQRYFAEVLANNIYLRAKKENLNTDKISFDYFGIPTIGNGRGIAEIRQLYEKVDSDIQAYAKGDKPQASYSHLIDAMLAFCIAADEHRNDGSIGLEIDKNYSLYPLDKNTGEVFTKDIFSQIKITDNEFSDKKLVRKKAIEGFNTHRQMTRDGIYAENYLPILIHKELNEVRKGYTWKNSEEIKIFKGKKYDIQQLNNLVYCLKFVDKPISIDIQISTLEELRNILTTNNIAATAEYYYINLKTQKLHEYYIENYNTALGYKKYSKEMEFLRSLAYRSERVKIKSIDDVKQVLDKDSNFIIGKITLPFKKEWQRLYREWQNTTIKDDYEFLKSFFNVKSITKLHKKVRKDFSLPISTNEGKFLVKRKTWDNNFIYQILNDSDSRVDGTKPFIPAFDISKNEIVEAIIDSFTSKNIFWLPKNIELQKVDNKNIFAIDTSKWFEVETPSDLRDIGVATIQYKIDNNSRPKVRVKLDYVIDDDSKINYFTNHSLLKSRYPDKVLEILKQSTTIEFESSGFNKTIKEMLGMTLAGIYNETSNN

SEQ ID NO: 221 - protein, 1629 aa, Francisella tularensis
  source 1..1629: note = subsp. novicida (strain GA99-3548)
MNFKILPIAIDLGVKNTGVFSAFYQKGTSLERLDNKNGKVYELSKDSYTLLMNNRTARRHQRRGIDRKQLVKKLFKLIWTEQLNLEWDKDTQQAISFLFNRRGFSFITDGYSPEYLNIVPEQVKAILMDIFDDYNGEDDLDSYLKLATEQESKISEIYNKLMQKILEFKLRKLCTDIKDDKVSTKTLKEITSYEFELLADYLANYSESLKTQKFSYTDKQGNLKELSYYHHDKYNIQEFLKRHATINDEILDTLLTDDLDIWNFNFEKFDFDKNEEKLQNQEDKDHTQAHLHHFVFAVNKIKSEMASGGRHRGQYFQEITNVLDENNHQEGYLKNFCENLHNKKYSNLSVKNLVNLIGNLSNLELKPLRKYFNDKIHAKADHWDEQKFTETYCHWILGEWRVGLKDQDKKEGAKYSYKDLCNELKQKVTNAGLIDFLLELDPCRTIPPYLDNNNRKPPKCQSLILNPKFLDNQYPNWQQYLQELKKLQIIQDYLESFETDLKVLKSSKDQPYFVEYKSSNQQIASGQRDYKDLDARILQFIFDRVKASDELLLNEIYFQAKKLKQKASSELEKLESSKKLDEVIANSQLSKILKSQHTNGIFEQGTFLHLVCKYYKQRQRARDSRLYIMPEYRYDKKLDKYNNTGRFDDDNQLLTYCNHKPRQKRYQLLNDLAGVLQVSPNFLKDKIGSDDDLFISKWLVEHIRGFKKACEDSLKIQKDNRGLLNHKINIARNTKGKCEKEIFNLICKIEGSEDKKGNYKHGLAYELGVLLFGEPNEASKPEFDRKIKKFNSIYSFAQIQQIAFAERKGNANTCAVCSADNAHRMQQIKITEPVEDNKDKIILSAKAQRLPAIPTRIVDGAVKKMATILAKNIVDDNWQNIKQVLSAKHQLHIPIITESNAFEFEPALADVKGKSLKDRRKKALERISPENIFKDKNNRIKEFAKGISAYSGANLTDGDFDGAKEELDHIIPRSHKKYGTLNDEANLICVTRDDNKNKGNRIFCLHDLANNYKLKQFETTDDLEIEKKIADTIWDASKKDFKFGNYRSFINLTPQEQKAFRHALFLADENPIKQAVIRAINNRNRTFVNGTQRYFAEVLANNIYLRAKKENLNTDKISFDYFGIPTIGNGRGIAEIRQLYEKVDSDIQVYAKGDKPQASYSHLIDAMLAFCIAADEHRNDGSIGLEIDKNYSLYPLDKNTGEVFTKDIFSQIKITDNEFSDKKLVRKKATEGFNTHRQMTRDGIYAENYLPILIHKELDEVRKGYTWKNSEEIKIFKGKKYDIQQLNNLLYCLKFVDKPISIDIQISTLEELRNILTTNNIAATAEYYYINLKTQKLHEYYIENYNTALGYKKYTKEMEFLRSLAYRSERVKIKSIDDVKQVLDKDSNFIIGKITLPFKKEWQRLYREWQNTTIKDDYEFLKSFFNVKSITKLHKKVRKDFSLPISTNEGKFLVKRKTWDNNFIYQILNDSDSRVDGTKPFIPAFDISKNEIVEAIIDSFTSKNIFWLPKNIELQKVDNKNIFAIDTSKWFEVETPSDLRDIGVATIQYKIDNNSRPKVRVKLDYVIDDDSKINYFTNHSLLKSRYPDKVLEILKQSTIIEFESSGFNKTIKEMLGMTLAGIYNETSNN

SEQ ID NO: 222 - protein, 1629 aa, Francisella tularensis; identical to SEQ ID NO: 26

SEQ ID NO: 223 - protein, 1629 aa, Francisella tularensis
  source 1..1629: note = subsp. novicida (strain GA99-3549)
MNVKILPIAIDLGVKNTGVFSAFYQKGTSLERLDNKNGKVYELSKDSYTLLMNNRTARRHQRRGIDRKQLVKRLFKLIWTEQLNLEWDKDTQQAISFLFNRRGFSFITDGYSPEYLNIVPEQVKAILMDIFDDYNGEDDLDSYLKLATEQESKISEIYNKLMQKILEFKLRKLCTDIKDDKVSTKTLKEITSYEFELLADYLANYSEILKTQKFSYTDKQGNLKELSYYHHDKYNIQEFLKRHATINDEILDTLLTDDLDIWNFNFEKFDFDKNEEKLQNQEDKDHTQAHLHHFVFAVNKIKSEMASGGRHRGQYFQEITNVLDENNHQEGYLKNFCENLHNKKYSNLSVKNLVNLIGNLSNLELKPLRKYFNDKIHAKADHWDEQKFTETYCHWILGEWRVGVKDQDKKDGAKYSYKDLCNELKQKVTKAGLVDFLLELDPCRTIPPYLDNNNRKPPKCQSLILNPKFLDNQYPNWQQYLQELKKLQSIQNYLESFETDLKVLKSSKDQPYFVEYKSSNQQIASGQRDYKDLDARILQFIFDRVKASDELLLNEIYFQAKKLKQKASSELEKLESSKKLDEVIANSQLSQILKSQHTNGIFEQGTFLHLVCKYYKQRQRARDSRLYIMPEYRYDKKLDKYNNTGRFDDDNQLLTYCNHKPRQKRYQLLNDLAGVLQVSPNFLKDKIGSDDDLFISKWLVEHIRGFKKACEDSLKIQKDNRGLLNHKINIARNTKGKCEKEIFNLICKIEGSEDKKGNYKHGLAYELGVLLFGEPNEASKPEFDRKIKKFNSIYSFAQIQQIAFAERKGNANTCAVCSADNAHRMQQIKITEPVEDNKDKIILSAKAQRLPAIPTRIVDGAVKKMATILAKNIVDDNWQNIKQVLSAKHQLHIPIITESNAFEFEPALADVKGKSIKDRRKKALERISPENIFKDKNNRIKEFAKGISAYSGDNLASGDFDGAKEELDHIIPRSHKKYGTLNDEANLICVTRDDNKNKGNRIFCLHDLANNYKLKQFETTDDLEIEKKIADTIWDASKKDFKFGNYRSFINLTPQEQKAFRHALFLADENPIKQAVIRAINNRNRTFVNGTQRYFAEVLANNIYLRAKKENLNTDKISFDYFGIPTIGNGRGIVEIRQLYEKVDSDIQAYAKGDKPQASYSHLIDAMLAFCIAADEHRNDGSIGLEIDKNYSLYPLDKNTGEVFTKDIFSQIKITNNEFSDKKLVRKKATEGFNTHRQMTRDGIYAENYLPILIHKELDEVRKGYTWGNSEELKIHKGKKYDIQQLNNLVYCLKFIDKSISIDIQISTLEELRNILTTNNIATTAEYYYINLKTQKLHEYYIENYNTALGYKKYTKEMEFLRSLAYRSERVKIKSIDDVKQVLDKDSNFIIGKITLPFKKEWQRLYREWQNTTIKDDYEFLKSFFNVKSITKLHKKVRKDFSLPISTNEGKFLVKRKTWDNNFIYQILNDSDSRVDGTKPFIPAFDISKNEIVEAIIDSFTSKNIFWLPKNIELQKVDNKNIFAIDTSKWFEVETPSDLRDIGVATIQYKIDNNSRPKVRVKLDYVIDDDSKINYFTNHSLLKSRYPDKVLEILKQSTIIEFESSGFNKTIKEMLGMTLAGIYNETSNN

SEQ ID NO: 224 - protein, 1323 aa, Fructobacillus fructosus
  source 1..1323: note = KCTC 3544
MVYDVGLDIGTGSVGWVALDENGKLARAKGKNLVGVRLFDTAQTAADRRGFRTTRRRLSRRKWRLRLLDELFSAEINEIDSSFFQRLKYSYVHPKDEENKAHYYGGYLFPTEEETKKFHRSYPTIYHLRQELMAQPNKRFDIREIYLAIHHLVKYRGHFLSSQEKITIGSTYNPEDLANAIEVYADEKGLSWELNNPEQLTEIISGEAGYGLNKSMKADEALKLFEFDNNQDKVAIKTLLAGLTGNQIDFAKLFGKDISDKDEAKLWKLKLDDEALEEKSQTILSQLTDEEIELFHAVVQAYDGFVLIGLLNGADSVSAAMVQLYDQHREDRKLLKSLAQKAGLKHKRFSEIYEQLALATDEATIKNGISTARELVEESNLSKEVKEDTLRRLDENEFLPKQRTKANSVIPHQLHLAELQKILQNQGQYYPFLLDTFEKEDGQDNKIEELLRFRIPYYVGPLVTKKDVEHAGGDADNHWVERNEGFEKSRVTPWNFDKVFNRDKAARDFIERLTGNDTYLIGEKTLPQNSLRYQLFTVLNELNNVRVNGKKFDSKTKADLINDLFKARKTVSLSALKDYLKAQGKGDVTITGLADESKFNSSLSSYNDLKKTFDAEYLENEDNQETLEKIIEIQTVFEDSKIASRELSKLPLDDDQVKKLSQTHYTGWGRLSEKLLDSKIIDERGQKVSILDKLKSTSQNFMSIINNDKYGVQAWITEQNTGSSKLTFDEKVNELTTSPANKRGIKQSFAVLNDIKKAMKEEPRRVYLEFAREDQTSVRSVPRYNQLKEKYQSKSLSEEAKVLKKTLDGNKNKMSDDRYFLYFQQQGKDMYTGRPINFERLSQDYDIDHIIPQAFTKDDSLDNRVLVSRPENARKSDSFAYTDEVQKQDGSLWTSLLKSGFINRKKYERLTKAGKYLDGQKTGFIARQLVETRQIIKNVASLIEGEYENSKAVAIRSEITADMRLLVGIKKHREINSFHHAFDALLITAAGQYMQNRYPDRDSTNVYNEFDRYTNDYLKNLRQLSSRDEVRRLKSFGFVVGTMRKGNEDWSEENTSYLRKVMMFKNILTTKKTEKDRGPLNKETIFSPKSGKKLIPLNSKRSDTALYGGYSNVYSAYMTLVRANGKNLLIKIPISIANQIEVGNLKINDYIVNNPAIKKFEKILISKLPLGQLVNEDGNLIYLASNEYRHNAKQLWLSTTDADKIASISENSSDEELLEAYDILTSENVKNRFPFFKKDIDKLSQVRDEFLDSDKRIAVIQTILRGLQIDAAYQAPVKIISKKVSDWHKLQQSGGIKLSDNSEMIYQSATGIFETRVKISDLL

SEQ ID NO: 225 - protein, 1374 aa, Fusobacterium nucleatum
  source 1..1374: note = subsp. vincentii ATCC 49256
MKKQKFSDYYLGFDIGTNSVGWCVTDLDYNVLRFNKKDMWGSRLFDEAKTAAERRVQRNSRRRLKRRKWRLNLLEEIFSDEIMKIDSNFFRRLKESSLWLEDKNSKEKFTLFNDDNYKDYDFYKQYPTIFHLRDELIKNPEKKDIRLIYLALHSIFKSRGHFLFEGQNLKEIKNFETLYNNLISFLEDNGINKSIDKDNIEKLEKIICDSGKGLKDKEKEFKGIFNSDKQLVAIFKLSVGSSVSLNDLFDTDEYKKEEVEKEKISFREQIYEDDKPIYYSILGEKIELLDIAKSFYDFMVLNNILSDSNYISEAKVKLYEEHKKDLKNLKYIIRKYNKENYDKLFKDKNENNYPAYIGLNKEKDKKEVVEKSRLKIDDLIKVIKGYLPKPERIEEKDKTIFNEILNKIELKTILPKQRISDNGTLPYQIHEVELEKILENQSKYYDFLNYEENGVSTKDKLLKTFKFRIPYYVGPLNSYHKDKGGNSWIVRKEEGKILPWNFEQKVDIEKSAEEFIKRMTNKCTYLNGEDVIPKDSFLYSEYIILNELNKVQVNDEFLNEENKRKIIDELFKENKKVSEKKFKEYLLVNQIANRTVELKGIKDSFNSNYVSYIKFKDIFGEKLNLDIYKEISEKSILWKCLYGDDKKIFEKKIKNEYGDILNKDEIKKINSFKFNTWGRLSEKLLTGIEFINLETGECYSSVMEALRRTNYNLMELLSSKFTLQESIDNENKEMNEVSYRDLIEESYVSPSLKRAILQTLKIYEEIKKITGRVPKKVFIEMARGGDESMKNKKIPARQEQLKKLYDSCGNDIANFSIDIKEMKNSLSSYDNNSLRQKKLYLYYLQFGKCMYTGREIDLDRLLQNNDTYDIDHIYPRSKVIKDDSFDNLVLVLKNENAEKSNEYPVKKEIQEKMKSFWRFLKEKNFISDEKYKRLTGKDDFELRGFMARQLVNVRQTTKEVGKILQQIEPEIKIVYSKAEIASSFREMFDFIKVRELNDTHHAKDAYLNIVAGNVYNTKFTEKPYRYLQEIKENYDVKKIYNYDIKNAWDKENSLEIVKKNMEKNTVNITRFIKEEKGELFNLNPIKKGETSNEIISIKPKLYDGKDNKLNEKYGYYTSLKAAYFIYVEHEKKNKKVKTFERITRIDSTLIKNEKNLIKYLVSQKKLLNPKIIKKIYKEQTLIIDSYPYTFTGVDSNKKVELKNKKQLYLEKKYEQILKNALKFVEDNQGETEENYKFIYLKKRNNNEKNETIDAVKERYNIEFNEMYDKFLEKLSSKDYKNYINNKLYTNFLNSKEKFKKLKLWEKSLILREFLKIFNKNTYGKYEIKDSQTKEKLFSFPEDTGRIRLGQSSLGNNKELLEESVTGLFVKKIKL

SEQ ID NO: 226 - protein, 1367 aa, Fusobacterium sp.
  source 1..1367: note = 1_1_41FAA
MKKQQFSDYYLGFDIGTNSVGWCVTDFNYNVLRFNKKDMWGSRLFDEAKTAAERRVQRNSRRRLKRRKWRLNLLEEIFSDEILKIDSNFFRRLKESSLWLEDKSSKEKFTLFNDDNYKDYDFYKQYPTIFHLRNELIKNPEKKDIRLVYLALHSIFKSRGHFLFEGQNLKDIKNFETLYNNLMAFLEDNDIYKNIDSSYIGNLENIICDSKKGLKDKEKEFKEIFNSDKQLVGFFKLSVGSSVSLNDLFDTDEYKKGEVEKEKISFREQIYEDDKPIYYSILGEKIEFLDIAKSFYDFMVLNNILADSQYISEAKVKLYDEHKRDLKNLKYIIRKYNKENYDKLFKDKNESNYSAYIGLNKEKGKKEVIEKSRLKIDDFAKIIKGYLPKAEKIDEKDRSIFNEILDKIELKTILPKQRISDNGTLPYQIHEAELEKILENQAKYYDFLNHEENGISTKDKLLMTFKFRIPYYVGPLNSYHKNKGGNSWIVRKEEGKILPWNFEQKVDIEKSAEEFIKRMTNKCTYLNGEDVIPKDSFLYSEYIILNELNKVQVNDEFLNKEIKKKIIEDLFKKSKKISEKNFREYLLVNQITNKTVELKGVKDAFNSNYVSYIKFKDIFGDKLNLDIYKEISEKSILWKCLYGDDKKIFEKKIKSVYGDILTKDEIKKINSFKFNTWGRLSEKLLTEIEFIDLETGECYSSVMDALRRTNYNLMELLSSKFTLQENIDNENKEVSEFSYRDLVEESYVSPSLKRAILQTLKIYEEIRKITGRIPKKVFIEMARGGDETMKNKKIPARQEQLKKLYDSCGKDISNFSIDIKEMKNSLNSYDNNSLRQKKLYLYYLQFGKCMYTGKEIDLNRLLQNNDTYDIDHIYPRSKVIKDDSFDNLVLVLKNENAEKSNEYPLKKEIQEKMKSFWKFLKEKNFISDEKYKRLTGKDEFELRGFMARQLVNVRQTTKEAGKILQQIEPEIKIVYSKAEIASSFREMFDFIKVRELNDTHHAKDAYLNIVAGNVYNTKFTEKPYRYLQEIKENYDVKKIYNYDIKNAWDKEKSLEIVKKNMEKNTVNITRFIKEEKGQLFDLNPIRKGETSNEIIAIKPKFYEGSTEKLNEKYGYYKSLNPAYFIYVEHKEKNKIIRSFERVNLVDVNKIKDEKSLIKYLIENKGLIEPKVIKKVYKRQVILINNFPYSIVALDSNKLMDFENLKPLFLERKYEKILKNAIKFLEDNQGKTEEYYKFLYLKKKDRNEKNETIDSVKERYNIEFNEMYDKFLEKLDSKDYKNYINNKKYSELVNVKEKFIKLNLFDKAFTLKSFLDLFNRKTMADFSKVGLTKYLGKIQKISSNVLSKNELHLLEESVTGLFVKKIKL

SEQ ID NO: 227 - protein, 1367 aa, Fusobacterium sp.
  source 1..1367: note = 3_1_27
MKKQKFSDYYLGFDIGTNSVGWCVTDLDYNVLRFNKKDMWGSRLFDEAKTAAERRVQRNSRRRLKRRKWRLNLLEEIFSDEIMKIDSNFFRRLKESSLWLEDKNSKEKFTLFNDDNYKDYDFYKQYPTIFHLRDELIKNPEKKDIRLIYLALHSIFKSRGHFLFEGQNLKEIKNFETLYNNLISFLEDNGINKSIDKDNIKKLEKIICDSGKGLKDKEKEFKEIFNSDKQLVAIFKLSVGSSVSLNDLFDTDEYKKEEVEKEKISFREQIYEDDKPIYYSILGEKIELLDIAKSFYDFMVLNNILSDSNYISEAKVKLYEEHKKDLKNLKYIIRKYNKENYDKLFKDKNENNYPAYIGLNKEKGKKEVVEKSGLKIDDLIKVIKGYLPKPERIEEKDKIIFNEILNKIELKTILPKQRISDNGTLPYQIHEVELEKILENQSKYYDFLNYEENGVSTKDKLLKTFKFRIPYYVGPLNSYHKDKGGNSWIVRKEEGKILPWNFEQKVDIEKSAEEFIKRMTNKCTYLNGEDVIPKDSFLYSEYIILNELNKVQVNDEFLNEENKRKIIDELFKENKKVSEKKFKEYLLVNQIANRTVELKGIKDSFNSNYVSYIKFKDIFGEKLNLDIYKEISEKSILWKCLYGDDKKIFEKKIKNEYGDILNKDEIKKINSFKFNTWGRLSEKLLTGIEFINLETGECYSSVMEALRRTNYNLMELLSSKFTLQESIDNGNKEMNEVSYRDLIEESYVSPSLKRAILQTLKIYEEIKKITGRVPKKVFIEMARGGDETMKNKKIPARQEQLKKLYDSCGNDIANFSIDIKKMKSSLSSYDNNSLRQKKLYLYYLQFGKCMYTGREIDLDRLLQNNDTYDIDHIYPRSKVIKDDSFDNLVLVLKNENAEKSNEYPVKKEIQEKMKSFWRFLKEKNFISDEKYKRLTGKDDFELRGFMARQLVNVRQTTKEVGKILQQIEPEIKIVYSKAEIASSFREMFDFIKVRELNDTHHAKDAYLNIVAGNVYNTKFTEKPYRYLQEIKENYDVKKIYNYDIKNAWDKENSLEIVKKNMKKNTVNITRFIKEEKGQLFDLNPIKKGETSNEIISIKPKLYNGKEEKLNEKYGYYKSLNPAYFLYVEHKEKNKRIKSFERVNLVDVNNIKDEKSLVKYLIENKKLVEPRLIKKVYKRQVILINDYPYSIVALDSNKLMDFENLKPLFLENKYEKILKNVIKFLEDNQGKSEENYKFIYLKKKDRYEKNETLESVKDRYNLEFNEMYDKFLEKLDSKDYKNYINNKKYKNLLDVKEKFIKLNLFDKAFTLKSFLDLFNRKTMADFSKVGLTKYLGKIQKISSNVLSKNELYLLEESVTGLFVKKIKL

SEQ ID NO: 228 - protein, 1367 aa, Fusobacterium sp.
  source 1..1367: note = 3_1_36A2
MKKQKFSDYYLGFDIGTNSVGWCVTDLDYNVLRFNKKDMWGSRLFDEAKTAAERRVQRNSRRRLKRRKWRLNLLEEIFSDEIMKIDSNFFRRLKESSLWLEDKNSKEKFTLFNDDNYKDYDFYKQYPTIFHLRDELIKNPEKKDIRLIYLALHSIFKSRGHFLFEGQNLKEIKNFETLYNNLISFLEDNGINKSIDKDNIKKLEKIICDSGKGLKDKEKEFKEIFNSDKQLVAIFKLSVGSSVSLNDLFDTDEYKKEEVEKEKISFREQIYEDDKPIYYSILGEKIELLDIAKSFYDFMVLNNILSDSNYISEAKVKLYEEHKKDLKNLKYIIRKYNKENYDKLFKDKNENNYPAYIGLNKEKGKKEVVEKSGLKIDDLIKVIKGYLPKPERIEEKDKTIFNEILNKIELKTILPKQRISDNGTLPYQIHEVELEKILENQSKYYDFLNYEENGVSTKDKLLKTFKFRIPYYVGPLNSYHKDKGGNSWIVRKEEGKILPWNFEQKVDIEKSAEEFIKRMTNKCTYLNGEDVIPKDSFLYSEYIILNELNKVQVNDEFLNEENKRKIIDELFKENKKVSEKKFKEYLLVNQIANRTVELKGIKDSFNSNYVSYIKFKDIFGEKLNLDIYKEISEKSILWKCLYGDDKKIFEKKIKNEYGDILNKDEIKKINSFKFNTWGRLSEKLLTGIEFINLETGECYSSVMEALRRTNYNLMELLSSKFTLQESIDNGNKEMNEVSYRDLIEESYVSPSLKRAILQTLKIYEEIKKITGRVPKKVFIEMARGGDETMKNKKIPARQEQLKKLYDSCGNDIANFSIDIKKMKSSLSSYDNNSLRQKKLYLYYLQFGKCMYTGREIDLDRLLQNNDTYDIDHIYPRSKVIKDDSFDNLVLVLKNENAEKSNEYPVKKEIQEKMKSFWRFLKEKNFISDEKYKRLTGKDDFELRGFMARQLVNVRQTTKEVGKILQQIEPEIKIVYSKAEIASSFREMFDFIKVRELNDTHHAKDAYLNIVAGNVYNTKFTEKPYRYLQEIKENYDVKKIYNYDIKNAWDKENSLEIVKKNMKKNTVNITRFIKEEKGQLFDLNPIKKGETSNEIISIKPKLYNGKEEKLNEKYGYYKSLNPAYFLYVEHKEKNKRIKSFERVNLVDVNNIKDEKSLVKYLIENKKLVEPRLIKKVYKRQVILINDYPYSIVALDSNKLMDFENLKPLFLENKYEKILKNVIKFLEDNQGKSEENYKFIYLKKKDRYEKNETLESVKDRYNLEFNEMYDKFLEKLDSKDYKNYINNKKYKNLLDVKEKFIKLNLFDKAFTLKSFLDLFNRKTMADFSKVGLTKYLGKIQKISSNVLSKNELYLLEESVTGLFVKKIKL

SEQ ID NO: 229 - protein, 1391 aa, Galbibacter sp.
  source 1..1391: note = ck-I2-15
MKTILGLDLGTNSIGWALVKEAENENEVSDIIKLGVRVNPLTVDELTNFEGGKAYSNNAERTLKRGARRNLQRYKLRRENLIEILLKNGLINKDTALTEVGKETTHQTLKLRSKSANEKVSLEDLAKILLSINKKRGYKSSRKVNAEDDGVAIDGMEVAKLLYDENMTPGEYVLRLLESGKKHLPDFYRSDLQEEFNLVWKKQSEFYPLILTKELFFELHGKNKSQTWAICKEPLGIVGVKLKGSAKEQKFARYRLRKEALTQQIELEHLAIVLQDINNDSNKSSGYLGAISDRSKELFFNKETVGQYQYKQLQKDPNTSLKNQVFYRQDYLDEFEVIWRNQAKFYPQLTNELKQEIRDVVIFYQRKLKSQKNLISFCQFESTQQNYVEKETGKTKIRTIGRRVIPRSSPLFQEFKIWQSLNNLKFVNSESNQIIQFIELEDDVKKVVFDELNLRGDLKPNQVLKILSKYMKIGKLTQWKCNLEEIEGNRTNSALYNVFQMIAEEEGYGFNWGKKSALEIKSELKAIFSSIGINDSILDFDFSKKLDQQLSYQLWHLLYSAEEGNSKITEEDKFTYGNTGVALKKKLHLKFGFKPEYSTLISNLRFTSDYGNLSSKAISKILPFLRDGSDYSKACQYAGYNHSNSLSADELDNRELKPKLELLKKNSLRNPVVEKILNQMVNVVNQVIDNYGKPDEVRIELARELKKSAKERSQMTKNISDATRRNAEIKKYLSKEFGIPNPTKGDVIRYRLWEELASNGYKDLFRDKYIPKEKLFSNEIDIEHIIPKALLFDDSFSNKTLAFKVDNLKKADRTAFDFMSTDFSKDVDSYIGRIETLHKDGKISSSKYKKLMIPKSKLVDGFIERDLRNTQYIAKQARKMLLEVFKTVVPTTGKITDKLREDWDLINVMKELNFPKYKALGLTKKIERFDVGSEKIKSINVIEGWSKRNDHRHHAMDALAVAFTTHNHIQYLNYLNARKDIHHEMHGTIKSIENQIIGKDVMGKRRFIPPISDLRMKAKLQIESILISFKNKNKVVTWSVNKTKLKGKDNYNKRRQLTPRGQLHKETVYGKIKLIDPKPLKLNNKFTLVRASMIVDKVHREIVLQHLSKYDNNSEVAFDSKTIKIDPILIEGIGLKEVVCYEDVFKIRKKISGDNFKNEKHLEKVIDEKVKQILKDRVIKFQGNFKEAFSNLEENPIWLNKSKGIAVKSVAIKGVNNAESLHEGKDHFGDQILDKNKKQIPVDFVSTGNNHHVGIYEDKDGNLQERVVSFFEAVTRVNEGLPIIDKTYNSDIGWKFKFTMKQNEMFVFPSDDFDPNEFDLTDGKNAAKISPNLYRVQKIATKNYMFRHHLETVVTNDLEFTYKSIRSTGWLRNLVKVRINHLGEIVYVGEY

SEQ ID NO: 230 - protein, 1025 aa, Gamma proteobacterium
  source 1..1025: note = HdN1
MGGYMPQLMRYRLALDIGSTSIGWAMIRLSMQNEPIAIIRMGVRIFSDGRNPKDGSSLAVTRRVARQMRRRRDRLLKRKTRLLNALVQKKFFPEDADARKALVVLNPYELRKEGLYRQLSGPEFGRALFHISQRRGFLSNRKTDKKDNDSSVLKKAIVDLRQQLEVENCQTIGEWLFKQQQSGKSVRARLRGKTQKDKAYDFYIDRAMIAHEFDTLWVSQAKYDPLLFNEDARAILRDILLYQRPLKPVKPGRCTLIPDESRAPLALPLTQQARIYQELNHLRITTPALGAQALTVAQRNTIAALLEKSDVTFVKIAKALGLTSTTEFNLQDIKRDRLKGNATAIILARNQYFGRRWHDFNADLQNLIVDKLVNEGSETALIEWLKANTDVDESAAERVSGVTLPEGYGSLSVAALRRLLPALKEDVVVYSEAVKRAGFDSHSALSLIEQTGELYQELPYYGEVLQRHVGFGSGDPNDSPERRFGKIANPTVHIGLNELRKIINALIKRYGNPAEVVVELARDLKLSREKRKEIQEEQKQRQDRNEKRIKDACEILGIDPLVIDRGKRREISQKMQLWDELNPKDAANRRCPYTGDQISIEKLLSAEVEIEHILPFSKTLDDSLNNKTVAMRRANRDKGNRTPYEAFGESLNPDYDYDAILQRASLMPREKRKRFASDGYQQWLRDDKDFLSRALNDTAYLSRIAKEYLTLICPPNSVRAIPGRMTAQLRAMFGLNRLLSEGGIKNREDHRHHAIDAAVIGVTDQGLLQKFSRASARTRELQLSRLVDDMPLPWDTYREHVTRALEHLVVSHKPDHGYQGKMHEDTAWGLRDNGQVTRRVRSEDGGPRQRLLENKNVVKINSTRDFSRHGIDEQGQVNAYKGYVGGSNYCIEIWIDEKGKWNSDVVSTFQAYQIVRELGEKAAWQKLRNPLLSLSAKPLVMRLIIDDVVKMQIAGQNKIMRVVKIAQNGQIFFAEHNEANVDARDKDKNNPFKYISKTAGSLQKAGGIHMAISPIGDARPVRYGR

SEQ ID NO: 231 - protein, 1397 aa, Gamma proteobacterium
  source 1..1397: note = HTCC5015
MTKNYISPIAIDLGAKFTGVALYQYLEGADCTQEVAKGLLVDDRGNVTWSQEGRRGKRHQVRGYKRRKMAKRLLWLILDSEYGIKREEVTEPLLKFINGLLNRRGYTYISEEVDEESMNVSPLPFSEMMPDYFNSSAPLLEQLAKLLSDKNKLVRFRAEGKIPSNKNEFKKLLDTALDGKYKDEKKELSEAWGNILIASENVLKSTVDGHKSRSEYLANIKEDIKSNEELEKQISSKEIDGFYNLVGHLSNFQLRLLRKYFNDPNMSGVSYWDEKRLEKYFYQWVQGWHTKGGTDEAEKKNIILKTKGAPLLKTLKSLSADLTIPPYEDQNNRRPPKCQSVLLSDEKLTMHYPKWKEWVGQLVKQNDNAYLNENVTLANALHRIVERSRSIDPYQLRLLISITDAEKRNDLAGYKRLKLSLGSEVDEFLLLVKNIVDETKEAREGLWFETENKLFFKCGKTPPRKEKLKSTLLSAVLGKNLSDDEQSSFIEEFWKSGTPKIERRNVRGWCRLASQVQKTYGVYLKEYGLQQLHKLEAGKKLDDKPLALLYKNSGLIASKIGEALNIEPDEVSRFASPHSLAQIFNIIEGDVAGFNKTCRACTYENIWRMQEEKVESLLTNQLLSEIHGERKVPLKSAMCTRLSADSTRPFDGQMASIIEHIARKIAQHKIAQINDVPKEFSIDIPIIIESNQFSFTAELEEIKRGRGSAKAKKAKELGEKSKAGWVSKTERIKTSSEGICPYTGAPLGGSGEIDHIIPRSLTGRTKKTVFNSEANLIYCSSKGNHDKGNRVYVIEQLNDKYLKKQFSTSDVNLIKKKIKTTIQRFTEGGEKLRSFSELSREDQKAFRHALFVPELKSEVTSLLAVKNITRVNGTQAWLAKKIASLLAEHLDKQGRDYTLSAHQIDPWSVSKQRKMLASAEPIWAKKDPQPAASHVVDAVCTFLEALEQPHTASRLKTISSTSFEKTGWRSALIPDLIKVDALDRRPKYRRYNIGSTSLFKDGIYAERFLPILIDENGLMAGYDIDNSLKAKGADVVFESLSPFLLFKGEEVGAQSLSDWQERIDGRYLYMSIDKVKAFDYLQEKVGEKDIAAELLNSIHFTQRKTELRAKFSDDSGKKMKTLDAIRKSLKLTVTVNEIGKRKEKCGFSGTIGIPAKSAWENLLDEPLLETYWGTKMPPQEIWEKVYRKHFPRNIPNQAHRKVRKDFSLPVVDSVSGGFRVKRKTPNGYNYQLLAIDGYSAVGFKKEGDNVDFKSPALVPQIAESKSVTPISSELVHLDKNEIVYFDEWRKIDISDSDLKQFVSSLELAPGSQNRFYIRFTVDEDQFERHFKSALRVNGIQDLDTVNKTFDWNREIPSLLIPPRSNLFLLETGQKITFEYIANGANAEVKKAYSLRRA

SEQ ID NO: 232 - protein, 1186 aa, Gardnerella vaginalis
  source 1..1186: note = 1500E
MEGNISYAIGIDVGLNSVGLAAIRLDNNGEPIRILKAMSVIHDAGIDPNGAKESDTRKAISGVARRVRRLYRQRRRRLQKLDFLLHSLGFPVVENKDLDFSDSFIPWIFRAKLADEYIADEKQRKQMLSVAIRHIARHRGWRNPYQSIKSMTQETEYSEFYNELLKNIEKFAPGVGCEGSTPAQLVRDYLLLQQGKASRRLRITTDEKRKNHPNSLNPILPRKLMQSDNMLEILNIFNVQHIDDKYVREQIINAVFYAKSPRGSAENRVGKDAITGKGKRALKASLAFQKYRIISTISNLRIRENSKERCLTIEEKQSVYKLLTTSTDESSKEKSAEAPLYTWIDVADCLGIERYKLRGVGSQIGDGESVGNRPPMLNSELAIIYANNKSLGKSLLTWWLDANRTQEDKEALIEILSNTVDIEAIHDNPEYQDKYGSAIAFIDSMDETEIAALENISLPDGRAAYSLETLDKLNKQMLETDDDLFEARKKLFNLPNNWRPSEAPIAEPTGNPSVDRVLKIVHRFLISAKNRWGNPERINIEHVRSGFKSKKMANSYKELLDKRTKGKENLKAMMRNSLHLGMSDSISDADIRRYEAVQRQNGQCLYCGSEITYHTCELDHIVPRKGPGSTNTRENLVATCSLCNAQKCNTPFSTWCEQSTYCKNHDISVDSAINRVRAFIFPPNSYDKRGANQFKKEVIARLKQKVGDEAFDNRSIESVAWMANELHRRIDWYYNSQNYQTNNGISDITNKAQTNVGVYAGSLTAIARRMSGIDGKLEFFDGRRKTRFDRRHHAVDASVIAMMTPGIAQILAIKCNLRETQLLQGNKVVPGGIDWKEYPTANDQGYQQYANWSVRMNALLKLLNEEMRADRIAVVNSIRLRYNNSSVHQYKVNALLKLHVGDEIDSGTIRRSSTPALYCALTRNPDYDVNNGLPENPNRAILLHDKKLNADDSITFFKAQAVQLFVREGSAEIGSSTHHLRIYEYFKKLKSGKIKKSYGMIRVFQNDLHRHIHEDLFSCDLPEQSISMRYADTEVAHAVQTGNSNYLGYLVPGDEIIVDFSHVKLSGNIGTFVEFLNKIGANCAAYNHWVVVGTDTEKVLILKPSMISSEGIDKLYSNCKRNNFDYSSYEKSINEILVGKGWRVSVNVLAKYNAETIRRNALGEVRWTSRSHLPISWSWNTGENRE

SEQ ID NO: 233 - protein, 1186 aa, Gardnerella vaginalis
  source 1..1186: note = 284V
MEGNISYAIGIDVGLNSVGLAAIRLDDYGEPIRILKAMSVIHDAGIDPNGAKESDTRKAISGVARRVRRLYRQRRRRLQKLDFLLQSLGWPVVENKDLDFSDSFIPWIFRAKLADEYIADEEQRKQMLSVAIRHIARHRGWRNPYQSIKSMMQETEYSEFYNELLKNIEKLAPGVGCEGSTPAQLVRDYLLSQQGKASRRLRITTGGRRKNHPHSLDPVLPRKLMQSDNMLEILNIFNVQHIDDKYVREQIINAVFYAESPRGSAENRVGKDAITGKGKRALKASLAFQKYRIISTISNLRIRENSKERCLTIEEKQNVYKLLTTSIDKSSKRKSAEAPLYTWIDVADCLGIERYKLRGVGSQIGDGESVGNRPPMLNSELAILYANNKSLGQSLITWWLASNRTQEDKEALIEILSNTVDIEAIHDNPEYQDKYGSAIAFIDSMNETEIAALENISLPDGRAAYSLETLDELNKQMLETDDDLFEARKKLFNLPNNWRPAEAPIAEPTGNPSVDRVLKIVHRFLISAKNRWGNPERINIEHVRSGFQSKKMANSYKELLDKRTEGKENLKAMMRNSLHLGTSDSISDADIRRYEAVQRQNGQCLYCGSEITYHTCELDHIVPRKGPGSTNTRENLVATCSSCNAQKCNTPFATWCEQSTYCKNHDISADSAINRVRAFIFPPNSYDKRGANQFKKEVIARLKQKVGDEAFDNRSIESVAWMANELHRRIDWYYNSQNYQTNNGISDISNKAQTNVGVYAGSLTAIARRMSGIDGKLEFFDGRRKTRFDRRHHAVDASVIAMMTPGIAQILAIKCNLRETQLLQGNKVVPGGIDWKEYPTANDQGYQQYANWSVRMNALLKLLNEEMRADRIAVVNSIRLRYSNSSVHQYEVNALLKLHVGDEIDSETIRRSSTPALYCALTRNPDYDVNNGFPENPGRTILLHNKKLNADDSITFFKAQAVQLFVREGSAKIGNSIHHLRIYEYFEKLKSGKIKKSYGMIRVFQNDLHRHIHEDLFSCDLPEQSISMRYADTKVAHAVQTGNANYLGYLVPGDEIIVDFSHITLSENIGKFVEFLNKIGADCTAYRHWVVVGTDTEKVLILKPSMISSEGIDKLYSNCERNNFDYSSYEKSINEILAGKGWRVSVNVLAQYKAATIRRNALGEVRWASRSHLPISWSWDTGENRE

SEQ ID NO: 234 - protein, 1186 aa, Gardnerella vaginalis
  source 1..1186: note = 5-1
MEGNISYAIGIDVGLNSVGLAAIRLDNNGEPIRILKAMSVIHDAGIDPNGAKESDTRKAISGVARRVRRLYRQRRRRLQKLDFLLHSLGFPVVENKDLDFSDSFTPWIFRAKLADEYIADEKQRKQMLSVAIRHIARHRGWRNPYQSIKSMTQETEYSEFYNELLKNIEKFAPGVSCEGSTPAQLVRDYLLSQQGKASRRLRITTDDRRKNHPNSLDPVLPRKLMQSDNMLEILNIFNVQHIDNKYVREQIINAVFYAKSPRGSAENRVGKDAITGKGKRALKASLAFQKYRIISTISNLRIRENSKERCLTIEEKQSVYKLLTTSTDEYSKEKSAEAPLYTWIDVADCLGIERYKLRGVGSQIEDGESVGNRPPMLNSELAILYANAKSLKQSLITWWLAANRTQEDKEAFIEILSNTVDIEAIHDNPEYQDKYGSVIAFIDSMDETEIAALENISLPNGRAAYSLETLDKLNKQMLETDDDLFEARKKLFNLPNNWRPSEAPIAEPTGNPSVDRVLKIVHRFLISAKNRWGNPERINIEHVRSGFQSKKMANSYKKLLDKRTEGKENLKAMMRNSLHLGTSDSISDADIRRYEAVQRQNGQCLYCGSEITYHTCELDHIVPRKGPGSTNTRENLVATCSSCNAQKCNTPFATWCEESTYCKNHDISVDSAINRVRAFIFPPNSYDKRGASQFKKEVIARLKQKVGDEAFDNRSIESVAWMANELHRRIDWYYNSQNYQTNNGISDITNKAQTNVGVYAGSLTAIARRMSGIDGKLEFFDGRRKTRFDRRHHAVDASVIAMMTPGIAQILAIKCNLRETQLLQGNKVVPGGIDWKEYPTANDQGYQQYANWSVRMNALLELLNEEMRADRIAVVNSIRLRYSNSSVHKDDVHALLKLHVGDEIDSETIRRASTPALYCALTRNPDYDVNNGLPENTDRTILLHDKKLNADDSITFFKSKAAQLFVREGSVEIGNSIHHLRIYEYFEKLKSGKVKKSYGMIRVFQDDLHRYIHEDLFSCDLPEQSISMRYADTKVAHAVQTGNANYLGYLVPGDEIIVDFSHVKLSGYIGEFVEFLNKIGANCAAYKHWVVAGTDDKTTLILKPSMISSEGIDKLYSNCERNNFDYASYEKSIDKILVDKGWRVSVNVLDQYKAATIRRNALGEPRWASRSHLPISWSWDTGENRE

SEQ ID NO: 235 - protein, 1392 aa, Gemella haemolysans
  source 1..1392: note = ATCC 10379
MANKTWYLGLDIGSASVGWAATDTGYKIIRKNKKRLWGVRLFEEAKTAEDRRGYRSSRRRLARRKWRLNLLEELFTSEVKKVDENFFLRLKESQYHYEDKTHKVPYAIFNDKDYTDKDYYKDYPTIYHLRSKLMTEENPDIRKVFLAIHHIIKNRGHFLLQGQSFKDGNLNNLIKELLELDILHVGFEVTEEVVDKIADISLEKKTSKDKLNDIKELYPKEKQLLEVFRLIFGGKTSLDKLFAIDEYKELDAAIKSVSFKEKIYEEVRHDYEQVLSNYIELLDLAKLVYDSIILSDIKKEGKTLSESKVELFEKHRDDLLKLKNLVKNDSKLSEDKKVELYALIFKEDKDKGTNYVNYIRKSEEGKGCNYEDFKKFLVKELAKLEESSVKTEIIKDLELEQFLPLQRTKDNSVVPYQIHKEELVKILDNAARYHSFLNEKDESGYNVREKVIQLLEFRIPYYVGPLNSSKKAKEGGFAWSVRNTGYENTPVTPWNYSKVIDESASAEKFITNLTNKCTYLKGEDVLPKSSLLYSEFALLNELNALKYDGNRISLEARNTIIEKLFKQQGKKVTKTSIKNLLKAEGYIDGKGEITGIDITVKNDLKSYRDFKKILGNKFNSEHVENIILWITLYGESRKLIKAKIESVYGEVYSKDEITKMSRLVYKDWGRFSRKLLTELVSKKLYNEETGECLNIIGAMRQNNILFMELLADRFDYSKQIVEFNKELQEDVTEIAPEILDDLYVSPAVKRSIWQTVRIVEELKKIIGCAPAKIFVETTRSNQEKKKPTDSRKKQLELAYKAVKKDVKELEKEIGTINFDVLNDRLSSVEPSKLKAKKLYLYYTQLGRCMYSEEPINISELFDNNKYDIDHIYPQSKIKDDSFTNTVLVKRESNAAKTDRYPLGSDIQTPSNRRFWKFLKEKGLISDEKYNRLVRTEEFSDEELSGFIARQLVETSQSVKAVASILGELNPETSICYSKAENVSSFRQNFGKIKKGDRDSKNNDQLIKVREINDYHHAKDAYLNVVVGNVYDTKFTRNVFNFIKDKKDGRKYSLNKVFYENVSDSKTVAWEMDKTIHQVEKVMNNNNIMVTRRTSEQKGGLFDATVYKAKVAAKAKDGVYYPLKTSNSVVKDVAKYGGYTSIGIAYYSIFEYTIVNKKGEEKITRIIPIPIYISQNIKDSTALIEFGKSQIFCRAYEKIKDFKLLYRKLCIGSKININNYQYYIGGKSDERFYYDSAIQVTLDKKSEKYLKILSKYQNWKKENKDGELWENITKENNIELYNKLVEKMNSEIFTKKKSNKYNELNSEEIRNNFIKISVEEQAKVLLEILNLLTNKKSIFDLKSIDIKAARGKISFNLTSLIQFSIIEQSITGFYEKEITIIGDKGNDMENNNS

SEQ ID NO: 236 - protein, 1385 aa, Gemella morbillorum
  source 1..1385: note = M424
MKNKTWYLGLGVGPTSIGWAATDSNYKLLRKNKKRLWGVRLFEEAKTAVDRRTFRAERRRLARRKWRISLLEELFAKEVSKNDPNFFLRLKESKYHFEDKSLMNEYILFNDKDYTDKDYYKEYPTIYHLRLSLTTEENPDIRKVYLAVHSMLKNRGHFLLQGQSFNDSNIDSVIKELLELETVKINFEVTDEVIHSLKKIALEKKNLSDKNNDVKKLYPKEKQLQEIFKLVFGGKTSLDKLYDIEEYKELDNSVKSISFKEKVYEEVRPDYEQILSNYIELLDLAKLVYDSIVLADIKKEGKTISESKVELYNKHKDDLANLKKLVKIDSKLSEDKKKEVYFTIFKEDKEKGTNYVNYTHRSQEGKSCSYEDFKKFLKKELEKLEDSPTKTTILEELDLETFLPLQRTKDNSVVPYQIHKEELVKILDNAAKYHSFLAEKDDSGYSTREKVVQLFEFRIPYYIGPLNAHHNTENGGYSWAIRKKGMESVPVTPWNFKDVIDESASAEAFVNNLKNKCAYLSGEDVLPKNSLLYSEYALLNELNALRYEGNRISVEARDVIVTKLFKEQGKKVTKKTIKELLKTEGFIDGKGEIVGIDNIVKNDLKSYRDFKKILADKFDKERVENIILWITLYGESRKLIKEKITKVYGDFYTVDEIEKMSRLTYKDWGILSRKLLTELVSEKLYNEETGECLNIIGAMRQGTILFMELLADKFDYMSQIKNHNKENKDDITEITPDILENLHASPAVKRSIWQTVRIVEELKTIIGCVPTKIFIETTKRNNAPYKVPTLNRNDLVTKYKTIREHEIFELEKELKNTLDFTLNKNRLINEEPSKLKATKLYLYYTQLGRCMYTGKKIDLGELFDNNNKYDIDHIYPQSKVKDGSFNNIVLVTKASNDMKADVFPLKSKFQTKENKIFWRFLKEKKLITEEKYNRLVRTEEFSNGELTGFITRQLVETSQAIKVISNVLRELNPETTICYSKAENVSSFRQSFGKIKEANRKAENNEKLIRVQEINDYYNAKDAYLSIVVGNVYDVKFTRNVHNFIKNNKDARRYSLNGLFYTDVKNANTIAWEMDKTVHVVEKTMNNNNILITRRTSEQKGALYDATLYKAKVAEKAKEGTYYPLKTTDSKIKDVGKYGGFTKIKIAYYSIFEYTLDGKKGKQKITRIVPIPIYISQNIKDDKALLEYAQTRLPGKDLKIKYRKLCIGSLVKINNFNYYIGGKTNNNFTFDSAVQVILDKDSESYIKELAKYLNWKKENKDGKLWESITEDKNIQLYDSLVKKMNTGIFIRKTPNKYTELLTLEVKNKFINIDIDEQVKLLLEILNLLTNKKFTSKLNEIGITASRGVCSFNLSNQSQFSIIEQSVTGVYEKEKLIIEKKKEGIL

SEQ ID NO: 237 - protein, 1003 aa, Gluconacetobacter diazotrophicus
MIDESLTFGIDLGIGSCGWAVLRRPSAFGRKGVIEGMGSWCFDVPETSKERTPTNQIRRSNRLLRRVIRRRRNRMAAIRRLLHAAGLLPSTDSDALKRPGHDPWELRARGLDKPLKPVEFAVVLGHIAKRRGFKSAAKRKATNISSDDKKMLTALEATRERLGRYRTVGEMFARDPDFASRRRNREGKYDRTTARDDLEHEVHALFAAQRRLGQGFASPELEEAFTASAFHQRPMQDSERLVGFCPFERTEKRAAKLTPSFERFRLLARLLNLRITTPDGERPLTVDEIALVTRDLGKTAKLSIKRVRTLIGLEDNQRFTTIRPEDEDRDIVARTGGAMTGTATLRKALGEALWTDMQERPEQLDAIVQVLSFFEANETITEKLREIGLTLAVLDVLLTALDAGVFAKFKGAAHISTKAARNLLPHLEQGRRYDEACTMAGYDHAASRLSHHGQIVAKTQFNALVTEIGESIANPIARKALIEGLKQIWAMRNHWGLPGSIHVELARDVGNSIEKRREIEKHIEKNTALRARERREVHDLLDLEDVNGDTLLRYRLWKEQGGKCLYTGKAIHIRQIAATDNSVQVDHILPWSRFGDDSFNNKTLCLASANQQKKRSTPYEWLSGQTGDAWNAFVQRIETNKELRGFKKRNYLLKNAKEAEEKFRSRNLNDTRYAARLFAEAVKLLYAFGERQEKGGNRRVFTRPGALTAALRQAWGVESLKKQDGKRINDDRHHALDALTVAAVDEAEIQRLTKSFHEWEQQGLGRPLRRVEPPWESFRADVEATYPEVFVARPERRRARGEGHAATIRQVKERECTPIVFERKAVSSLKEADLERIKDGERNEAIVEAIRSWIATGRPADAPPRSPRGDIITKIRLATTIKAAVPVRGGTAGRGEMVRADVFSKPNRRGKDEWYLVPVYPHQIMNRKAWPKPPMRSIVANKDEDEWTEVGPEHQFRFSLYPRSNIEIIRPSGEVIEGYFVGLHRNTGALIPTPVGPDSYVIA

SEQ ID NO: 238 - protein, 1050 aa, Gluconacetobacter diazotrophicus
MGENMIDESLTFGIDLGIGSCGWAVLRRPSAFGRKGVIEGMGSWCFDVPETSKERTPTNQIRRSNRLLRRVIRRRRNRMAAIRRLLHAAGLLPSTDSDALKRPGHDPWELRARGLDKPLKPVEFAVVLGHIAKRRGFKSAAKRKATNISSDDKKMLTALEATRERLGRYRTVGEMFARDPDFASRRRNREGKYDRTTARDDLEHEVHALFAAQRRLGQGFASPELEEAFTASAFHQRPMQDSERLVGFCPFERTEKRAAKLTPSFERFRLLARLLNLRITTPDGERPLTVDEIALVTRDLGKTAKLSIKRVRTLIGLEDNQRFTTIRPEDEDRDIVARTGGAMTGTATLRKALGEALWTDMQERPEQLDAIVQVLSFFEANETITEKLREIGLTLAVLDVLLTALDAGVFAKFKGAAHISTKAARNLLPHLEQGRRYDEACTMAGYDHAASRLSHHGQIVAKTQFNALVTEIGESIANPIARKALIEGLKQIWAMRNHWGLPGSIHVELARDVGNSIEKRREIEKHIEKNTALRARERREVHDLLDLEDVNGDTLLRYRLWKEQGGKCLYTGKAIHIRQIAATDNSVQVDHILPWSRFGDDSFNNKTLCLASANQQKKRSTPYEWLSGQTGDAWNAFVQRIETNKELRGFKKRNYLLKNAKEAEEKFRSRNLNDTRYAARLFAEAVKLLYAFGERQEKGGNRRVFTRPGALTAALRQAWGVESLKKQDGKRINDDRHHALDALTVAAVDEAEIQRLTKSFHEWEQQGLGRPLRRVEPPWESFRADVEATYPEVFVARPERRRARGEGHAATIRQVKERECTPIVFERKAVSSLKEADLERIKDGERNEAIVEAIRSWIATGRPADAPPRSPRGDIITKIRLATTIKAAVPVRGGTAGRGEMVRADVFSKPNRRGKDEWYLVPVYPHQIMNRKAWPKPPMRSIVANKDEDEWTEVGPEHQFRFSLYPRSNIEIIRPSGEVIEGYFVGLHRNTGALTISAHNDPKSIHSGIGTKTLLAISKYQVDRFGRKSPVRKEVRTWHGEACISPTPPG

SEQ ID NO: 239 - protein, 1371 aa, Gordonibacter pamelaeae
  source 1..1371: note = 7-10-1-b
MNLRNVESYQVGLDIGTGSVGWAVLDDNGDLCRFKGKPTWGSRVFPTAETAAEARVHRGQRRRYDRRRQRIDLLQRFFADEVAKVDPEFFIRLNQARLHPENRDPAHADYRWPLFNGSNFTEKDYYRQFPTIYHLRAHLLKSDEPADIRLVYLALHNIVKHRGNFLHQDNPSLSARNANVGDAVEALCLALDEWCGAHDVECACDEAALAEALGDASLRPGEKRERAEAALGVEKAHKKLAKAVSSAVVGYAAEFGHVFFAESEGSKFALSNDEKVEAYVCPDEGRDLFDAMRAVHSSYVLMGILSEAQGELLSVCKVGEYERYKRDLETLKSLVRAYGPERYDEFFCGPFYEGTRDYDPGKAQGYTKYNLGASKLSHEDFLKEVQKLLKDIGAQADERYADIERAIEAGAFLRRLKTSDNGTIPYQLHLEEMDAIIERQAAFYPFLAQEKDKLKSLVSFRIPYYVGPLTQKNAARDGKGEARFAWSSRKPGMEDARVYPWNWEDVIDKDQSAEDFIRRMTGTCTYLKGEPVLARCSLDYELFCVLNELAGARWTQDGDKSYRFDAADRLGIVEDLFKKRKRVTYEAAEKWLARTHGPESGKSAGGAYHVSGGQGEDAFESQLSSHYDFCKILGVDELSDADEAMAEDIILWNTVFEDRSILKRKIKLAYGDRLGDAQVRKLCQKRYTGWGRLSGELLRGLRSATDNGPKTIMDILLEGDPNHARRMGAAMNLMEILHDDLLEFQAKIDEHNRERALAVGGMSVDEVTGSPALRRGINQALRVVDEIAGIAGKPPAHIYVEVTRDEGARNKGRRTTSRYRALEAALSSIKAQCADVYAELKERDPRALDDERLTLYFMQCGKCMYSGDALDINKLQTYQVDHILPQSYVKDDSFENKVLVRPDTNQRKGDTLLLDERLIARMRGFWRTLRDAELIGEKKFNNLTRTSVSDEQMKKFVSRQLVETGQMVKQVQQLLQARYPESEVQPVKAGVSHQLRVGCALAKSREINDFHHAHDAYLACQVGRFVQYRHSAVYSEPVKMAAVVKQFIKKQAEDYRRTRELPGSDGFIVSSFMTPGFDVKTGEVFRDAWDAGAEIDRIRRCFDYKDCFISRMPEETHGAFWDATIYSPRAAGKTLSLPLKRGLDPRKYGSYSREQFAYFFVYEAVKPKKKQRVLEFAPVPVRVASALANDPDALEDYARELAEAEGLVFERIRRRKVYKYQQIIVGDSRLYVTGREEVRNARQLAFSQDETKLICRIEQGEECEEGELLDLFRSMQRKYLACAPRLARLMKVAEMEEGFIAATASGKREVLLSLTSIAAAHRNSIDLKPIGRKGSSGQMKITFSKELSTNGILFVDSSVTGMFERRCRLGL

SEQ ID NO: 240 - protein, 1054 aa, Haemophilus parainfluenzae
  source 1..1054: note = ATCC 33392
MENKNLNYILGLDLGIASVGWAVVEIDEKENPLRLIDVGVRTFERAEVPKTGESLALSRRLARSARRLTQRRVARLKKAKRLLKSENILLSTDERLPHQVWQLRVEGLDHKLERQEWAAVLLHLIKHRGYLSQRKNESKSENKELGALLSGVDNNHKLLQQATYRSPAELAVKKFEVEEGHIRNQQGAYTHTFSRLDLLAEMELLFSRQQHFGNPFASEKLLENLTALLMWQKPALSGEAILKMLGKCTFEDEYKAAKNTYSAERFVWITKLNNLRIQENGLERALNDNERLALMEQPYDKNRLFYSQVRSILKLSDEAIFKGLRYSGEDKKAIETKAVLMEMKAYHQIRKVLEGNNLKAEWAELKANPTLLDEIGTAFSLYKTDEDISAYLAGKLSQPVLNALLENLSFDKFIQLSLKALYKLLPLMQQGLRYDEACREIYGDHYGKKTEENHHFLPQIPADEIRNPVVLRTLTQARKVINGVVRLYGSPARIHIETGREVGKSYKDRRELEKRQEENRKQRENAIKEFKEYFPHFAGEPKAKDILKMRLYKQQNAKCLYSGKPIELHRLLEKGYVEVDHALPFSRTWDDSFNNKVLVLANENQNKGNLTPFEWLDGKHNSERWRAFKALVETSAFPYAKKQRILSQKLDEKGFIERNLNDTRYVARFLCNFIADNMHLTGEGKRKVFASNGQITALLRSRWGLAKSREDNDRHHALDAVVVACSTVAMQQKITRFVRFEAGDVFTGERIDRETGEIIPLHFPTPWQFFKQEVEIRIFSDNPKLELENRLPDRPQANHEFVQPLFVSRMPTRKMTGQGHMETVKSAKRLNEGISVIKMPLTKLKLKDLELMVNREREKDLYDTLKARLEAFNDDPAKAFAEPFIKKGGAIVKSVRVEQIQKSGVLVREGNGVADNASMVRVDVFTKGGKYFLVPIYTWQVAKGILPNKAATQYKDEEDWEVMDNSATFKFSLHPNDLVKLVTKKKTILGYFNGLNRATGNIDIKEHDLDKSKGKQGIFEGVGIKLALSFEKYQVDELGKNIRLCKPSKRQPVR

SEQ ID NO: 241 - protein, 1052 aa, Haemophilus sputorum
  source 1..1052: note = CCUG 13788
MKNTSLNYVLGLDLGISSVGWAVVEIDEKENPLSLIDVGVRTFERAETQKGESLALARRLARSARRLTQRRVARLKKAKRLLKSENILLSTDECLPHQVWQLRVEGLERKLERQEWAAVLLHLIKHRGYLSQRKNESKSENKELGALLSGVANNHKLLQQTTYRTPAELAVKKFEVEEGHIRNQQGSYTHTFSRLDLLSEMELLFSRQQHFGNPFTSEKLLENLTALLMWQKPALSGDAILKMLGKCTFENEYKAAKHTYSAERFIWITKLNNLRIQENGLERALNDNERLALMKQPYEKAKLTYAQVRSILNLSDEAIFKGLRYSGEDKKTSETKTVLMEMKAYHQIRLALEKNDLKTEWAELKVNSSLLDEIGTAFSLYKTDEDISTCLAGKLSQPVLNALLENLNFDKFIQLSLKALHKILPLMQQGLRYDEACAEIYGDHYGKKTEENHLLLPQIPADEIRNPVVLRTLTQARKVINGVVRLYSSPARIHIETGREVGKSYQDRRELEKRQEENRKQREKAISEIKTLFPNFSGEPKAKDILKMRLYYQQNAKCLYSGKPLELHRLLEQGYVEIDHALPFSRTWDDSFNNKVLVLANENQNKGNLTPFEWLDGKNNSERWKAFKALVETSAFPYTKKQRILSQKLDEKGFIERNLNDTRYVARFLCNFIADNMHLTGEGKRKVFASNGQITALLRGRWGLAKSREDNDRHHALDAVVVACSTVSMQQKITRFVRFEEGNVFTGERIDRETGEIIPLHFPAPWKFFREEVEIRIFSDNPKLELENRLIARPQANHEFVQPLFVSRMPTRKMIGQGHMETIKSAKRLNEGLSVIKMLLTKLRLKDLESMVNREREKELYEALKARLEAFNDEPAKAFAEPFMKKGGAIVKSVRVEQVQKSGVLVRDGNGVADNASMVRVDVFTKGGKYFLVPIYTWQVAKGILPNKAVIQGKNEEDWEVMDDATFRFSLHQNDLVKLVTKKKTIFGYFNGLNRATGNIDIKEHDLEKSKVKDGIHQSIGIKLALSFEKYQVDELGKNIRLCKSSKRQAVR

SEQ ID NO: 242 - protein, 1052 aa, Haemophilus parainfluenzae
MENKNLHYILGLDLGIASVGWAVVEIDEKENPLRLIDVGVRTFERAETQKGESLALSRRSARSARRLTQRRVARLKKAKRLLKSENILLSTDERLPHQVWQLRVEGLDRKLERQEWAAVLLHLIKHRGYLSQRKNESKSENKELGALLSGVASNHELLQQATYRTPAELAVKKFEVEEGHIRNQQGAYTHTFSRLDLLAEMELLFSRQQHFGNPFASEKLLENLTALLMWQKPALSGEDILKMLGKCTFEDEYKAAKNTYTAERFVWITKLNNLRIQENGLERALSDNERLMLIEQPYEKAKLTYAQVRSILNLSDDAIFKGVRYSGEDKKAIETKTTLMEMKAYHQIRKVLEGNNLKAEWVALKANPTLLDEIGTAFSLYKTDEDISAYLAGKLSQPVLNALLENLSFDKFIQLSLKALYKLLPLMQQGLRYDEACREIYGDHYGKKTEETHHFLPQIPADEIRNPVVLRTLTQARKVINGVVRLYGSPARIHIETGREVGKSYKDRHELKKRQEENRKQREKTISEIKTLFPNFSGEPKGKDILKMRLYYQQNAKCLYSGKPLELHRLFEQKYVEVDHALPLSRTWDDSFNNKVLVLANENQNKGNLTPFEWLDGKNNSERWRTFKALVETSAFPYAKKQRILSQKLDEKGFIERNLNDTRYVARFLCNFIADNMHLTGEGKRKVFASNGQITALLRRRWGLAKSREDNDRHHALDAVLVACSTVAMQQKITRFVRFKAGDVFTGERIDRETGEIIPLHFPTPWQFFKQEVEIRIFSDNPKLELENRLPDRPQANHEFVQPLFVSRMPTRKMTGQGHMETVKSAKRLNEGISMIKMPLTKLKLKDLELMVNREREKDLYDALKTRLEAFNDDPAKAFAEPFMKKGGAIVKSVRVEQVQKSGVLVRQGNGVADNASMVRVDVFTKDGKYFLVPIYTWQVAKGILPNKAVIQGKDEEDWEDIDDATFQFSLHPNDLISVKTKKDEFLGYFNGLNRHTGGINIRTHDLEKSKGKQGIFEGIGVKIALSFEKYQIDELGKNIRLCKPSKRQPVR

SEQ ID NO: 243 - protein, 1052 aa, Haemophilus sputorum
  source 1..1052: note = HK 2154
MKNTSLNYVLGLDLGISSVGWAVVEIDEKENPLSLIDVGVRTFERAETQKGESLALARRLARSARRLTQRRVARLKKAKRLLKSENILLSTDECLPHQVWQLRVEGLERKLERQEWAAVLLHLIKHRGYLSQRKNESKSENKELGALLSGVANNHKLLQQTTYRTPAELAVKKFEVEEGHIRNQQGSYTHTFSRLDLLSEMELLFSRQQHFGNPFTSEKLLENLTALLMWQKPALSGDAILKMLGKCTFENEYKAAKHTYSAERFIWITKLNNLRIQENGLERALNDNERLALMKQPYEKAKLTYAQVRSILNLSDEAIFKGLRYSGEDKKTSETKTVLMEMKAYHQIRLALEKNDLKTEWAELKVNSSLLDEIGTAFSLYKTDEDISTCLAGKLSQPVLNALLENLNFDKFIQLSLKALHKILPLMQQGLRYDEACAEIYGDHYGKKTEENHLLLPQIPADEIRNPVVLRTLTQARKVINGVVRLYSSPARIHIETGREVGKSYQDRRELEKRQEENRKQREKAISEIKTLFPNFSGEPKAKDILKMRLYYQQNAKCLYSGKPLELHRLLEQGYVEIDHALPFSRTWDDSFNNKVLVLANENQNKGNLTPFEWLDGKNNSERWKAFKALVETSAFPYTKKQRILSQKLDEKGFIERNLNDTRYVARFLCNFIADNMHLTGEGKRKVFASNGQITALLRGRWGLAKSREDNDRHHALDAVVVACSTVSMQQKITRFVRFEEGNVFTGERIDRETGEIIPLHFPAPWKFFREEVEIRIFSDNPKLELENRLIARPQANHEFVQPLFVSRMPTRKMTGQGHMETIKSAKRLNEGLSVIKMLLTKLRLKDLESMVNREREKELYEALKARLEAFNDEPAKAFAEPFMKKGGAIVKSVRVEQVQKSGVLVRDGNGVADNASMVRVDVFTKGGKYFLVPIYTWQVAKGILPNKAVIQGKNEEDWEVMDDATFRFSLHQNDLVKLVTKKKTIFGYFNGLNRATGNIDIKEHDLEKSKVKDGIHQSIGIKLALSFEKYQVDELGKNIRLCKSSKRQAVR

SEQ ID NO: 244 - protein, 1338 aa, Helcococcus kunzii
  source 1..1338: note = ATCC 51366
MQDYYLGLDIGTNSVGWAVTDENYNLLRKKGKDLWGVRLFKEAQPATERRGHRSSRRRTIRKSLRKQLLRELFEEEINAIDKDFFLRLDESKYWLEDKKIEGKYSLFNDENFTDKDYYEKFPTIFHLRKALIESDDKEDIRLYFLAINQMMKRRGHFLIDGKLSNVEDITPFKECIQNLINEELDTEIETEFYDKAIKIVSDYSLKKTEKKNLIKDLVKETDSIEDSKKIINIFNLLISGKSKVNGIFDDEEILEKIKEDNKEDFYLTSEKYEENLEYFSQLLDYRFELISSLKSIYDYIILQEVLKGKKYLSYAQVERYKNHKEDLRKLKQLIKKYDKNGKIYYQIFRDENFKKGYVAYLGYYKKNKKNVPVKKCDYDTFSKNIKSTLDKICDKEDPLYIELIDKIEKGGFLLKQIVSTNSVIPHQVHELELDKILENLEKNYPSFKEISDGVSKIDKIKMIFNFRIPYYVGPLNDYHKDKVNSNTWIVKNEGFENENIRPWNFSKIVDEHACEEEFIKRMINECSYIPGEKVLPKSSLLYSEYMVLNELNNLRVNGDKLNPKIKKEIVENIYKKERKVTLKKIRNFLIINNYVDSKVEFSGLSDGIKANMSSYIDFAEILDDNFDNNMVEDLIEQITIHVGNVKLLTEKISNKYPNLEKKQINKIVNLKFKDWARFSRKLLVGIEGTEKETGEINTIIGFLRETNENFMELMSNRYTFSEEISEIKKKYIPNKLSKQIVDDLYVSPAVKKMIWQVLNINDELIKVLGKQPKKIFIEMARGKEEKPEVKDSRKNKLIELYKNLGKEGKEWLNRIEDKTEADFRNRALYLYYTQMGRCMYTGEIIDIERLYDKELYDLDHIIPRKMKKDDSIHKNLVLVTRNSNQYEKKDNYPVPEVIKSRENVRHLWYALKKKGLITEEKYNRLTRINPLSDKELSEFIERQLVETRQTTKVVKDLFENYYTDSKIVTVKAGLVSELRRDFEVLKCREINDLNHAHDAFLNIIVGDVWSKKFTSNPYNFVKKNREKYTLNNIFTKNQKDLRGNEIWNCAEGKKRIIKTLNKPSVLFSVENFEQTGQLFDQNIIGKQDYKEKTSYVPIKGDERLQDISKYGGYRGISGAYFFIVEHTEKNKRVKTIESLPIYMKSYVEENGLLDFCTNEMKLVDPKIIVKKLNYKSEIIVDGFKYLISGKTENRLSLETNEYLYWNHTQTTDIKKILNINEKIELEKYNGDIESERENIIKYIQIILEKFKLKPFIKRRNLPNIEINFADYETEKLLQLLVNLIPLTTKYVSPVDLTVISGSKYAGKVLIPKKISNLNEVIFISKSITGIYESRRRII

SEQ ID NO: 245 - protein, 1007 aa, Helicobacter canadensis
  source 1..1007: note = MIT 98-5491
MKVLGFDIGINSIGWAFVENNELKDCGVRLFTKAENPKTKESLALPRRNARSSRVRLRRRRSRLLSLKHIISKEFGLHYEDYIALDGNLPKAYTGKIESIYKLRYEALSQAISKEDLARVILHIAKHRGYMNKNQKTSQDSEKGAILSAIKENSNKIKHYQTAGEYFYKELFENLRDGTKEFKNIRNKAMKNEKTGNMESTYYNTILASDLEKELKLILEKQQAYHNYSDTFIKEVLEIAFYQRPLKDFSHLVGSCTFYENEKRACKNSYSAWEFIALGKIINTLESIKKDTGEIFSNEIITQILKEVLDKGSLSYTKLRKMINLDEKVKFKGLKYDKEGVEKTNLIEFKKLKEFKKALGEHNLERKTLDEIATHITLTKDENQLKKQLEQYALSQNQIDALAELDFNDHINLSFKALYEILPLMEKGKRYDEACNELGLKAKTSNQKSEFLPAFCDSIFAQELTNPIVNRAISEYRKVLNRLLKKYGKMHKIHIELARDAGLSKEARNKIEKEQKENKDINDKAEKTCKEFGLKPNAKNILKIKLWREQGEICAYSGKKITIDDLKEDKALEVDHIYPYSRSYDDSYNNKVLVFIKENQLKLNQTPYEAFGSNQEKWSKIQVLAQKLPYKKKNRILDENFKNKDQIEFISRNLNDTRYATSLIAKYTKEYLEFLPLSDDEDISLKSGEKGSKTHVQTMNGMLTSVLRHAWGFSQKDRNNHLHHALDAIIIAYSTNSIIKAFSDFKKNQEILKAKLYAKKLTSEEYKNQSKFTGFEKYRSKILEKLDSIFVSKPPNKNTKGALHEQTFYSYQDILEEYKTQEGLKRALECGKVRKIGTKYVVNDRMVRLDIFKKDNKFYGIPIYTMDFALGVLPNKVVTIGTDKDKIKKEWKTIDETYEFCFSLYKGDLVLIQKKEMQESEFAYYNGFDISSASISLEKHDNKFENLTENQKLLFPKAKEGDVEVRGIGIQGLKVFKKYMVTPLGEIQETRTEARQNIQPRKKHGLR

SEQ ID NO: 246 - protein, 1023 aa, Helicobacter cinaedi
  source 1..1023: note = CCUG 18818 = ATCC BAA-847
MKIYSFDIGVASIGWAFIENEVLQDCGIRIFTKAENPKNGASLALPRREARGVRKRLARRRGRLNTIKQLLCKEFGLQLEDYLSNDGELPKAYTASKANPLKSPYELRTLALSQKLDSKDLVRVILHIAKHRGYGNKHAKDSKDTESGKVKKAIEFNRKTLAEKGYRSVGEYLYREFFQQSRISQNNGATEFINVRNKAGNYEHCVAQDMLKEELESILNAQRQFGFSLKQDFESKLLTKIFEQRPLKSFADKVGNCCFIAGEKRAPKDSPSAIEFIALSRTINTLINLSKESGEIYNRAIILQIVESTLKKGEISYKELREIIRLDERLRFKDPRLDYSREIKEAEKVKFLEFKQLKGFKKALGESFTTLAISQLDEIAEHIALIKDRVKLNEKLESYALTKEQREALSNLSFSAHINLSLQALKQILPFMRGDNGEQCLDYDESVEKAGLKALSKDTLKGQMLPPLNEFEPYLSNPVVARALAEYRKVLNVLLKQYGSPHKIHIEYAREAKLSSTERQKYEKEQKDNYAANQAAHKKCQELGLEPSSTNLLKLKLWQEQGGLCLYSGAKITISYLQDPTALQVDHIYPYSRSFDDSYMNKCLVLTKANQEKGNRTPFEAFGTDSAKWGVITTLAQKLPHKKRRRILNTAFNDKEAGFKLRNLNDTSYIARLVADYTETYLEFLPLVESENTTLSKGQKGSKKHIAIVNGVLTSTMRYYLGFASKDRDNHLHHALDAVIIGFMNDSVIKAFSDFKKTQETSKAAYYAHTLSKQEYKKQRAFIQLPSGENFRVSVLEKVESVFVSKPPRKRVRGALHEATFYSPNDPKLLKNYGGTKGVERALALGKMRKVGAKIVSNGAMVRVDIFRHKSSGKFYGVPVYTMDFALGILPNKAVVVGKDQNGVIKDWLEMDSSYEFIFSLYKDDVILVQKKEMQRPELCYFVSFDTSGASIKVAKHDNNFSTLTENQKLLFSNATKEEVVGKSIGIQNLKVFEKWQVSVLGEVKRTQSYPRENISLASKAKK

SEQ ID NO: 247 - protein, 1023 aa, Helicobacter cinaedi
  source 1..1023: note = CCUG 18818
MKIYSFDIGVASIGWAFIENEVLQDCGIRIFTKAENPKNGASLALPRREARGVRKRLARRRGRLNTIKQLLCKEFGLQLEDYLSNDGELPKAYTASKANPLKSPYELRTLALSQKLDSKDLVRVILHIAKHRGYGNKHAKDSKDTESGKVKKAIEFNRKTLAEKGYRSVGEYLYREFFQQSRISQNNGATEFINVRNKAGNYEHCVAQDMLKEELESILNAQRQFGFSLKQDFENKLLTKIFEQRPLKSFADKVGNCCFIAGEKRAPKDSPSAIEFIALSRTINTLINLSKESGEIYNRAIILQIVESTLKKGEISYKELREIIRLDERLRFKDPRLDYSREIKEAEKVKFLEFKQLKGFKKALGESFTTLAISQLDEIAEHIALIKDRVKLNEKLESYALTKEQREALSNLSFSAHINLSLQALKQILPFMRGDNGEQCLDYDESVEKAGLKALSKDTLKGQMLPPLNEFEPYLSNPVVARALAEYRKVLNVLLKQYGSPHKIHIEYAREAKLSSTERQKYEKEQKDNYAANQAAHKKCQELGLEPSSTNLLKLKLWQEQGGLCLYSGAKITISYLQDPTALQVDHIYPYSRSFDDSYMNKCLVLTKANQEKGNRTPFEAFGTDSAKWGVITTLAQKLPHKKRRRILNTAFNDKEAGFKLRNLNDTSYIARLVADYTETYLEFLPLVESENTTLSKGQKGSKKHIAIVNGVLTSTMRYYLGFASKDRDNHLHHALDAVIIGFMNDSVIKAFSDFKKTQETSKAAYYAHTLSKQEYKKQRAFIQLPSGENFRVSVLEKVESVFVSKPPRKRVRGALHEATFYSPNDPKLLKNYGGTKGVERALALGKMRKVGAKIVSNGAMVRVDIFRHKSSGKFYGVPVYTMDFALGILPNKAVVVGKDQNGVIKDWLEMDSSYEFIFSLYKDDVILVQKKEMQRPELCYFVSFDTSGASIKVAKHDNNFSTLTENQKLLFSNATKEEVVGKSIGIQNLKVFEKWQVSVLGEVKRTQSYPRENISLASKAKK

SEQ ID NO: 248 - protein, 1023 aa, Helicobacter cinaedi
MKIYSFDIGVASIGWAFIENEVLQDCGIRIFTKAENPKNGASLALPRREARGVRKRLARRRGRLNTIKQLLCKEFGLQLEDYLSNDGELPKAYTASKANPLKSPYELRTLALSQKLDSKDLVRVILHIAKHRGYGNKHAKDSKDTESGKVKKAIEFNRKTLAEKGYRSVGEYLYREFFQQSRISQNNGATEFINVRNKAGNYEHCVAQDMLKEELESILNAQRQFGFSLKQDFENKLLTKIFEQRPLKSFADKVGNCCFIAGEKRTPKDSLSAIEFIALSRTINTLINLSKESGEIYNRAIILQIVESTLKKGEISYKELREIIRLDERLRFKDPRLDYSREIKEAEKVKFLEFKQLKGFKKALGESFTTLARSQLDEIAEHIALIKDRVKLNEKLESYALTKEQREALSNLSFSAHINLSLQALKQILPFMRGDNGEQCLDYDESVEKAGLKALSKDTLKGQMLPPLNEFEPYLSNPVVARALAEYRKVLNALLKQYGSPHKIHIEYAREAKLSSTERQKYEKEQKDNYAANQAAHKKCQELGLEPSSTNLLKLKLWQEQGGLCLYSGAKITISYLQDPTALQVDHIYPYSRSFDDSYMNKCLVLTKANQEKGNRTPFEAFGTDSAKWGVITTLAQKLPHKKRRRILNTAFNDKEAGFKLRNLNDTSYIARLVADYTETYLEFLPLVESENTTLGKGQKGSKKHIAIVNGALTSTMRYYLGFASKDRDNHLHHALDAVIIGFMNDSVIKAFSDFKKTQETSKAAYYAHTLSKQEYKKQRAFIQLPSGENFRASVLEKVESVFVSKPPRKRVRGALHEATFYSPNDPKLLKNYGGTKGVERALALGKMRKVGAKIVSNGAMVRVDIFRHKSSGKFYGVPVYTMDFALGILPNKAVVVGKDKNGVIKDWLEMDSSYEFIFSLYKDDLLLVQKKEMAEPELCYFMSFNSSIAQISVAKHDNNFSTLTKNQKLLFSNATQEDVSGKSIGIQNLQVFEKWQVSVLGEVKRTQSYPRENISLASKAKK

SEQ ID NO: 249 - protein, 1024 aa, Helicobacter mustelae
MIRTLGIDIGIASIGWAVIEGEYTDKGLENKEIVASGVRVFTKAENPKNKESLALPRTLARSARRRNARKKGRIQQVKHYLSKALGLDLECFVQGEKLATLFQTSKDFLSPWELRERALYRVLDKEELARVILHIAKRRGYDDITYGVEDNDSGKIKKAIAENSKRIKEEQCKTIGEMMYKLYFQKSLNVRNKKESYNRCVGRSELREELKTIFQIQQELKSPWVNEELIYKLLGNPDAQSKQEREGLIFYQRPLKGFGDKIGKCSHIKKGENSPYRACKHAPSAEEFVALTKSINFLKNLTNRHGLCFSQEDMCVYLGKILQEAQKNEKGLTYSKLKLLLDLPSDFEFLGLDYSGKNPEKAVFLSLPSTFKLNKITQDRKTQDKIANILGANKDWEAILKELESLQLSKEQIQTIKDAKLNFSKHINLSLEALYHLLPLMREGKRYDEGVEILQERGIFSKPQPKNRQLLPPLSELAKEESYFDIPNPVLRRALSEFRKVVNALLEKYGGFHYFHIELTRDVCKAKSARMQLEKINKKNKSENDAASQLLEVLGLPNTYNNRLKCKLWKQQEEYCLYSGEKITIDHLKDQRALQIDHAFPLSRSLDDSQSNKVLCLTSSNQEKSNKTPYEWLGSDEKKWDMYVGRVYSSNFSPSKKRKLTQKNFKERNEEDFLARNLVDTGYIGRVTKEYIKHSLSFLPLPDGKKEHIRIISGSMTSTMRSFWGVQEKNRDHHLHHAQDAIIIACIEPSMIQKYTTYLKDKETHRLKSHQKAQILREGDHKLSLRWPMSNFKDKIQESIQNIIPSHHVSHKVTGELHQETVRTKEFYYQAFGGEEGVKKALKFGKIREINQGIVDNGAMVRVDIFKSKDKGKFYAVPIYTYDFAIGKLPNKAIVQGKKNGIIKDWLEMDENYEFCFSLFKNDCIKIQTKEMQEAVLAIYKSTNSAKATIELEHLSKYALKNEDEEKMFTDTDKEKNKTMTRESCGIQGLKVFQKVKLSVLGEVLEHKPRNRQNIALKTTPKHV

SEQ ID NO: 250 - protein, 1688 aa, Ignavibacterium album
MEFKKVLGLDIGTNSIGCALLSLPKSIQDYGKGGRLEWLTSRVIPLDADYMKAFIDGKNGLPQVITPAGKRRQKRGSRRLKHRYKLRRSRLIRVFKTLNWLPEDFPLDNPKRIKETISTEGKFSFRISDYVPISDESYREFYREFGYPENEIEQVIEEINFRRKTKGKNKNPMIKLLPEDWVVYYLRKKALIKPTTKEELIRIIYLFNQRRGFKSSRKDLTETAILDYDEFAKRLAEKEKYSAENYETKFVSITKVKEVVELKTDGRKGKKRFKVILEDSRIEPYEIERKEKPDWEGKEYTFLVTQKLEKGKFKQNKPDLPKEEDWALCTTALDNRMGSKHPGEFFFDELLKAFKEKRGYKIRQYPVNRWRYKKELEFIWTKQCQLNPELNNLNINKEILRKLATVLYPSQSKFFGPKIKEFENSDVLHIISEDIIYYQRDLKSQKSLISECRYEKRKGIDGEIYGLKCIPKSSPLYQEFRIWQDIHNIKVIRKESEVNGKKKINIDETQLYINENIKEKLFELFNSKDSLSEKDILELISLNIINSGIKISKKEEETTHRINLFANRKELKGNETKSRYRKVFKKLGFDGEYILNHPSKLNRLWHSDYSNDYADKEKTEKSILSSLGWKNRNGKWEKSKNYDVFNLPLEVAKAIANLPPLKKEYGSYSALAIRKMLVVMRDGKYWQHPDQIAKDQENTSLMLFDKNLIQLTNNQRKVLNKYLLTLAEVQKRSTLIKQKLNEIEHNPYKLELVSDQDLEKQVLKSFLEKKNESDYLKGLKTYQAGYLIYGKHSEKDVPIVNSPDELGEYIRKKLPNNSLRNPIVEQVIRETIFIVRDVWKSFGIIDEIHIELGRELKNNSEERKKTSESQEKNFQEKERARKLLKELLNSSNFEHYDENGNKIFSSFTVNPNPDSPLDIEKFRIWKNQSGLTDEELNKKLKDEKIPTEIEVKKYILWLTQKCRSPYTGKIIPLSKLFDSNVYEIEHIIPRSKMKNDSTNNLVICELGVNKAKGDRLAANFISESNGKCKFGEVEYTLLKYGDYLQYCKDTFKYQKAKYKNLLATEPPEDFIERQINDTRYIGRKLAELLTPVVKDSKNIIFTIGSITSELKITWGLNGVWKDILRPRFKRLESIINKKLIFQDEDDPNKYHFDLSINPQLDKEGLKRLDHRHHALDATIIAATTREHVRYLNSLNAADNDEEKREYFLSLCNHKIRDFKLPWENFTSEVKSKLLSCVVSYKESKPILSDPFNKYLKWEYKNGKWQKVFAIQIKNDRWKAVRRSMFKEPIGTVWIKKIKEVSLKEAIKIQAIWEEVKNDPVRKKKEKYIYDDYAQKVIAKIVQELGLSSSMRKQDDEKLNKFINEAKVSAGVNKNLNTTNKTIYNLEGRFYEKIKVAEYVLYKAKRMPLNKKEYIEKLSLQKMFNDLPNFILEKSILDNYPEILKELESDNKYIIEPHKKNNPVNRLLLEHILEYHNNPKEAFSTEGLEKLNKKAINKIGKPIKYITRLDGDINEEEIFRGAVFETDKGSNVYFVMYENNQTKDREFLKPNPSISVLKAIEHKNKIDFFAPNRLGFSRIILSPGDLVYVPTNDQYVLIKDNSSNETIINWDDNEFISNRIYQVKKFTGNSCYFLKNDIASLILSYSASNGVGEFGSQNISEYSVDDPPIRIKDVCIKIRVDRLGNVRPL

SEQ ID NO: 251 - protein, 1092 aa, Ilyobacter polytropus
MKYSIGLDIGIASVGWSVINKDKERIEDMGVRIFQKAENPKDGSSLASSRREKRGSRRRNRRKKHRLDRIKNILCESGLVKKNEIEKIYKNAYLKSPWELRAKSLEAKISNKEIAQILLHIAKRRGFKSFRKTDRNADDTGKLLSGIQENKKIMEEKGYLTIGDMVAKDPKFNTHVRNKAGSYLFSFSRKLLEDEVRKIQAKQKELGNTHFTDDVLEKYIEVFNSQRNFDEGPSKPSPYYSEIGQIAKMIGNCTFESSEKRTAKNTWSGERFVFLQKLNNFRIVGLSGKRPLTEEERDIVEKEVYLKKEVRYEKLRKILYLKEEERFGDLNYSKDEKQDKKTEKTKFISLIGNYTIKKLNLSEKLKSEIEEDKSKLDKIIEILTFNKSDKTIESNLKKLELSREDIEILLSEEFSGTLNLSLKAIKKILPYLEKGLSYNEACEKADYDYKNNGIKFKRGELLPVVDKDLIANPVVLRAISQTRKVVNAIIRKYGTPHTIHVEVARDLAKSYDDRQTIIKENKKRELENEKTKKFISEEFGIKNVKGKLLLKYRLYQEQEGRCAYSRKELSLSEVILDESMTDIDHIIPYSRSMDDSYSNKVLVLSGENRKKSNLLPKEYFDRQGRDWDTFVLNVKAMKIHPRKKSNLLKEKFTREDNKDWKSRALNDTRYISRFVANYLENALEYRDDSPKKRVFMIPGQLTAQLRARWRLNKVRENGDLHHALDAAVVAVTDQKAINNISNISRYKELKNCKDVIPSIEYHADEETGEVYFEEVKDTRFPMPWSGFDLELQKRLESENPREEFYNLLSDKRYLGWFNYEEGFIEKLRPVFVSRMPNRGVKGQAHQETIRSSKKISNQIAVSKKPLNSIKLKDLEKMQGRDTDRKLYEALKNRLEEYDDKPEKAFAEPFYKPTNSGKRGPLVRGIKVEEKQNVGVYVNGGQASNGSMVRIDVFRKNGKFYTVPIYVHQTLLKELPNRAINGKPYKDWDLIDGSFEFLYSFYPNDLIEIEFGKSKSIKNDNKLTKTEIPEVNLSEVLGYYRGMDTSTGAATIDTQDGKIQMRIGIKTVKNIKKYQVDVLGNVYKVKREKRQTF

SEQ ID NO: 252 - protein, 1354 aa, Indibacter alkaliphilus
  source 1..1354: note = LW1
MKKILGLDLGTTSIGWAFIKEPEKDVVGSEIVDMGVRIVPLSSDEENDFAKGNTISINADRTLKRGARRNLQRFKQRRNALLETFKEKNLIPSNFQYAEDGPSSTFSTLKLRDKAAKEKIELDDFVKVLLQINKKRGYKSSRKAMSEEDEGTAIDSMGIAKELYENDLTPGQWVYEALKNGRKNVPDFYRSDLQEEFKKIVNYQSEFYPDILNTSFVEDWMGKASTPTKQYFNKRGVQLAENKGKREERRLQEYKWRAEAVNFKIDLSEIALILSQINSQISNSSGYLGAISDRSKELYFKNLTVGQYLYQQVKKNPHTRLKGQVFYRQDYLDEFEKIWSVQSSFYPQLNDELKQEVRDVTIFFQRRLKSQKHLISNCEFEEHHKVVPKSHPIFQEFRIWQNLNNLTLIKKDNLNEKCELALEDKTALANELAFKKELSVKDALKVLGLKPSDWEFNFTKIEGNRTNHAFFEAFAKIIELEDGEPIDLGNLKADDILDQFSEAFLRIGIDTELLQVNSDIEGAEYEKQSYIQFWHLLYSSEDDQKLKQNLIRKFGFKPEHAKILASISLQDDHASLSSRAIKKILPHLQSGLIYDKACTYAGYNHSSSFTKDENEKRELRAELELLKKNSLRNPVVEKILNQMINVVNAILKDPNLGRPDEIRVEMARELKANAEQRKNMTSNIASATRDHEKYREILKKEFGLKRVTKNDLLRYKLWLETDGISLYTGKPIEASKLFSKEYDIEHIIPKARLFDDSFSNKTICERQLNIDKANVTAFSFLQNKLSADEFEQYQSRVKSLYGKLSKAKIQKLLMANDKIPEDFIARQLQETRYISKKAKEILFEITMRVSVTTGTITDKLREDWGLVEIMKELNWEKYDKLGLTYTIEGKHGERLNKIKDWNKRNDHRHHAMDALTVALTKPAYIQYLNNLNAKAIGNKKGTEIFAIEQKYLKRENGKLCFIPPIENIRAEAKKHLSKILVSYKAKNKVVTINKNKTKKKAGFNEQTALTPRGQLHKETVYGKSFHYSTKFEKIGASFDAQKINTVAKKEEREALLKRLAENGNDPKKAFTGKNSLNKMPIYLDLGKNIKLSEKVKTVVLEQNYTIRKNIDPDLKVDKVIDVGIKRILESRLEEFGGNAKLAFSNLEENPIWLNKEKGIPIKRVKISGVSNVESLHVKKDHFGEKILDEEGNEIPVDFVSTGNNHHVAIYEDEDGNLQDEVVNFYEAVIRRNQGESIIKYRHEEGWNFLYSIKQNEFFVFPSQDFNPNDFDLLDPKNYDLISPNLYRAQKFSKVMYGNSAVRDYVFRHHLETVLNDVKELKDVAYKQLKSLQYLNGIKKVRLNHLGQIIQVGEY

SEQ ID NO: 253 - protein, 1397 aa, Joostella marina
  source 1..1397: note = DSM 19592
MKKVLGLDLGTNSIGWALVNEATKEEKKEGKSSEIIKLGVRVNPLTVDEKTNFEKGRPLSTNADRTLKRSARRNLQRYKLRRRNLIEILIKNGFITKDTPLTETGKDTTHQTLKLRAKSAKEKVDLKDFAKILLTINKKRGYKSSRKVNSDEDGLAIDGMAVAKHLYEQNLTPGQYVLNLLQKNKKYVPDFYRSDLQEEFKNIWNNQKTYYFDILTDTLFEELKDKNKSQTWAICKKPFDIAGIKQIGKASDKRLERYKWRTEGLTQKLNLEYLAIALQEINNDINKSSGYLGAISDRSKELFFNKETVGENLYRQLVKTPHTSLRNQVFYRQDYLDEFETIWETQAKFYPQLTHTLKEEIRDVIIFYQRKLKSQKSLISFCQFESWEQTYIEKETGKSKTRTVGRKVIPKSSPLFQEFKIWQNLNSLEFRNSDEGEIIEFIKLDEDIRQTVFEELNLRGNLKPNDVLKILGNYISLGKVSQWKCNFEEIEGNRTNAALYNVYQIIAENEGYGFDWAKKTASEINKELKNIFPQLGIDASILDFDFTQANFDKQTSYQLWHLLYSAEEDFKISEEDKVLYGNSSVSLKKKLHQKYGFKPEYTKLLTNISLQPDYGNLSAKAICNILPYLKENNVYSEACDLTGYNHSNFLTAEEQAKRPLKPILELLKKNSLRNPVVEKILNQMVNVVNQVIETYGKPDEIRIELTRELKKSAKERANMTKSIADATRRNDDYRKTIIKEFGIPNPTKSDVVRYRLWQELASRGYKDIFTDTEIKPQELFSNKIDIEHIIPKALLFDDSFSNKTLAFKKDNLKKANRTAYDFIANDYAPNLENYIERVESLHKDRKITRAKRNKLLMLQSKLPDGFIERDLRNSQYITKEAKKMLYEVCRTVVSTSGSITDKLREDWDLINVMKELNFPKYKALGLTEKIERYDIGAEKMKEVEIIEDWNKRNDHRHHAIDALTVAFSTHSHIQYLNHLNARRDEGHKKHAAIIAIESTITEKEGNKKRRFIAPLPNFRLQAKEHIESILVSFKNKNKVVTNNINKTKRIKKDKFNTKVQLTPRGQLHKETIYGKIKQPLEKHIKLNKSFTLEQAKLIIDKRQREKVLNHLEKYAHNSDIAFNSKTLKKNPLLISDEPLKEVLCFEEVFTIRKDISYDNFKNEKQLDKVIDEKVKQALKERINQYNGDFREAFSDIERNPIWLNKAKGICVKRATIKGVSNAEPLHTAKNHLGEEVLTENKEQIPVDYVSTGNNHHVAIYEDEDGNLQEKVVSFYEAVIRVNEGLPIIDKEYNKSLGWTFKFTMKQNEMFVFPSEDFNPTEIDLLDQKNASLISPNLFRVQKFTIKDYFFRHHLETTVENNNTLKNTTWRREGLSGIYGIIKIRLNHLGEIVQVGEY

SEQ ID NO: 254 - protein, 1060 aa, Kingella kingae
  source 1..1060: note = PYKK081
MAAKSLNYILGLDLGIASCGWAVVEMDEQENPLRLIDVGVRTFEEAENPKDGSSLAETRRLARAQRRLISRRANRMNKLCRLLKQENVLQANDYDEKGLIIGLPNQAWELRAQGLDRKLEPKEWAAVLIHLVKHRGYLSQRKNESQTADKELGALLSGMNHNHQLLQSQSNQYRTPAELAIKQFATQDGHIRNQRGAYTHTFNRLDLQNELNQLFDAQTRLGNPHVSGSLKTAINDLLMNQKAALSGDAILEMLGRCTFEPSEYKAAKNTYSAERFVWLGKLTNLRIQDNGLESALSREQRELLLNEPYNKTKLTYQQVRKLLRLPETAFFKGLRYGKDNAESATFMEMKSYHAIRKSLENKSLKSEWEKLKTQPKLLDLIGTAFSIYKTDDEIAGCLKNQLPENVIIALQGQLNFSNFMELSLKALEKLLPLMEQGLRYDEACTQIYGNRHEKIADKTEKFLPNIPADKLRNPVVLRTLTQARKVINAIIRRYGSPARVHIETGREVGKSFSDRDKLKKQQEENQEQRRRAIDEWKQFFPNAAHEPKAVDILKLRLYQLQQGKCLYSGLPIDVRRLPEKGYVEIDHALPFSRTWDDSFNNKILVLASENQNKGNQTPYEYLRGADNSESWRLFVENVQNCQFSPNKKQKIMAKQLDEKGFLERNLNDTRYVSRFLCQFISEHLHLTGKGKKRVFASNGQITALLRGRWGLSKNREENDRHHAVDAVVVACSTVAMQQKITQFVRYQKGNVFTGERIDKETGEVISIHFPTPWEHFREEVMIRVFDDNPLRTLPEKLPNRPEALHEYVMPLFVSRMPTRKMTGQGHKETIKSAKRLDEKISVLRVPLTQLKLNDLENMVNREREPALYEALKARLEQFKNDPAKAFAEPFFKQGGQQVKAVRVEIVQKSGMLLRKINGVADNGSMVRVDVFEKSGKFYLVPIYAWQVAEGILPNYAVVAHKDESDWILMDESYHFKFALYKNDLLEVQTKKGGIMGYFASLDRATGAITIREHDRDKKKCKDGEHRSIGVKMASSFKKLQVDELGKNIHETRSRKRPNIG

SEQ ID NO: 255 - protein, 1391 aa, Kordia algicida
  source 1..1391: note = OT-1
MKKILGLDLGTNSIGWALVNEAEHEHEQSSIVKLGVRVNPLSVDEKTNFEKGRPLSINADRTSKRSARRNLQRFKLRRKNLINLLLKHHIISNETILTEVGKNTTHQTLKLRSKATQEKISLEEFARILLSINKKRGYKSSRKEKNEDEGFTIDGMAIAKELYDNQLTPGQYVYNILQDGKNYIPDFYRSDLQAEFDDVWQFQKKFYSSILTDEFYLKLKGQGKENTRKLFLAIHQVYTAENKGKRDAVKLQYYKWRSEAVKKQLSIEEVAYVLVEINNNINKSSGYLGAISDRSKALYFNNETVGEYLYGQLVKNRHNSLRNQVFYRQDYLDEFEKIWETQAKFYDELTNELKQEIRDVVIFYQRKLKSQKHLISDCLFEKHHKAIPKSSPLFQEFKIWQNLNYLEFVHTQSKEKIFFSELDDETRQFVFAELNIRGTLKIKEIKKLIGLETPVYWKSNFDEIEGNRTNQVLYNVYQNIADDLGYGFDWSKKHAFEINAELQAIFKDVGIDTAILNFDASIEENDFDKQKSYQLWHLLYSAEDTDKATEEDKLIYGNINTKLKKQLHQKYGFEAKYGNLLANISLQQDYGNLSAKAIKKILPYLESGNSFYEACTIVGYNPSNSLTKEQQQNRKLKDKLELLPKNSLRNPVVEKILNQKVNLINQLIDEYGKPDEVRIELARELKKSAKQRADLSKHINDATLKNQNIRKTLQKDFGIQNPSKNDVIRYKLYDELKDNGYKTLFTNKYIPKEQLFSKDVDIEHIIPKAILFDDSFSNKTLAYRNVNLAKADATAFDFISSKHLDDLDNYKARVETLFQSKRISKGKYKKLLMTRQNLPEDFIERDLRNSQYIAKKATAMLKEVFRSVVPTSGRITDKLREDWDLVNVMKELNLPKYRTLGLTEFIERKNGNKIEQIIDWTKRNDHRHHAMDALTVAFTTHNHIQYLNNLNVTHGLNGVDTDHEKSRLYAIKQAITKVYIVGKTKKRKFIPPMENFRSHAKNHLEGILISFKNKNKVVTKNKNRTKTKTKGVFNEKIQLTPRGQLHKETIYGHAKKVIVTKEKVSSKFTHEKILQVTKPAYREALLKRLASFKNDPKKAFSGKNALSKNPLYFDITSGKKVPDTVKLSYFENSYVIRKEVNSDNFKNEKSLQKVLDVGIRRILEKRLADYNGNAKEAFSNLEKNPIWKDKEKGVCIKKVRIEALKNAEPLHVKKDHLGKIILDDENKSTPVDFISTGNNHHVAIYEDKDGKLHDKVVSFYEVVSRVNLGLPIIDKSFNSHLDWKFLFSMKQNEMFVFPSEDFNPKEIDIGNPKNNELISKYLFRVQKFSKVTYGNSAVRDYVFRHHLETELIDKKELKGITYYQLKSIGMLEKLVKVRINHIGKIVHIGEY

SEQ ID NO: 256 - protein, 1314 aa, Lactobacillus animalis
  source 1..1314: note = KCTC 3501
MLKKDYSIGLDIGTNSVGHAVVTDDYKVPTKKMKVFGDTSKKTIKKNMLGVLLFNEGQTAADTRLKRGTRRRYTRRKNRLRYLQEIFAPELAKVDPNFLYRLEESSLVAEDKKYDVYPIFGKREEELLYHDTYKTIYHLRSALANNDQPADLRLVYLALAHIIKYRGNFLLEGEIDLRTTDINKVFAEFSETLNENSDENLGKLDVADIFKNNTFSKTKKSEELLKLSGAKKNQLAHQLFKMMVGNMGSFKKVLGTDEEHKLSFGKDTYEDDLNDLLAEAGDQYLDIFVAAKKVYDAAILASILDVKDTQTKTVFSQAMIERYEEHQKDLIELKRVFKKYLPEKCHDFFSEPKISGYAGYIDGKVSEEDFYKYTKKTLKGIPETEEILQKIDANNYLRKQRTFDNGAIPHQVHLKELVAIVENQGKYYPFLRENKDKFEKILNFRIPYYVGPLARGNSKFAWLTRAGEGKITPYNFDEMIDKETSAEDFIKHMTINDLYLPTEPVLPKHSLLYERYTIFNELAGVRYVTENGEAKYFDAQTKRSIFELFKLDRKVSEKMVIKHLKVVMPAIRIQALKGLDNGKFNASYGTYKDLVDMGVAPELLNDEVNSEKWEDIIKTLTIFEGRKLIKRRLENYRDFLGEDILRKLSRKKYTGWGRLSAKLLDGIYDKKTHKTILDCLMTEDYSQNFMQLINDDNYSFKETIKNAQVIEKEETLAKTVQELPGSPAIKKGILQSLEIVDEIIKVMGYKPKSIVVEMARETQKTHGTRKREDRVQQIVENLKDANELPEKLPSNAELSDERKYLYCLQNGRDMYTGAPLDYDHLQFYDVDHIIPQSFLKDDSIENKVLTIKKENVRKTNGLPSEAVIQKMGSFWKKLLDAGAMTNKKYDNLRRNLHGGLNEKLKERFIERQLVETRQITKYVAQLLDQRLNYDGNGVELDEKIAIVTLKAQLASQFRSEFKLRKVRALNNLHHAHDAYLNAIVANLIMAKYPELEPEFVYGKYRKAKFKGLGKATAKNTLYANVLYFLKENEVYPFWDKARDLPTIKRYLYRAQVNKVRKAERQIGGFSDEMLVPKSDSGKLLPRKEGLDPVKYGGYAKAVESYAVLITADEVKKGKTKKVKTLVNIPIIDSKKYEADPTAYLASRGYTNVTNSFILPKYSLLEDPEGRRRYLASFKEFQKANELILPQHLVELLYWVNAKDGEQKLEDHKAEFKELFDKIMEFADKYVVAPKNSEKIRRLYEENQDATPMELGKNFVELLRYTADGAASDFKFFGENIPRKRYNSAGSLLNGTLIYQSKTGLYETRIDLGKL

SEQ ID NO: 257 - protein, 1377 aa, Lactobacillus brevis
  source 1..1377: note = subsp. gravesensis ATCC 27305
MESNHDGEQVKYTLGLDIGTSSIGYAAIDKHQKPIRAKGKHVIGVRLFQEGQTAADRRAFRTTRRRLKRRKWRLNLLNRLFDPYLSEVDPNFLPRLRQSNLSPKDDNKHFNGSTLFPDKTDAAFYRQYPTMYHLRYALMTEKRKFDIREVYLAIHHIVKYRGNFLNSATVDSFKTSNIDFTSQFDRLNELYRQVILDEPFQINMDQVDEMTNKLLDNDALKLDTQKQVAKLLPVIYNDKPIDKQYTRIATEFSKAILGYKTKLDVILNLDTQNAKDWVIRLDDEDIDDKLPALVENLDESRQEIVTIIRDLYAQITLNAIVPKGKSLSESMVDKYNDHKDHLDLLMGLIHELGDDSAKGIKLREAYTQYVGKSDDKTLNQDDFYAAIKKNLDEDSKRSPKIQRLIEQASFMPKQRTSANGVIPHQLHQLELDRIIENQGRYYPFLKKPNPNTHKPNGGKYKLDELVAFRIPYYVGPLITKRDQEKTSGADFAWMIRKPGQEGEITPWNFDQKVDRMASANRFIRRMTTKDSYLVAEDVLPDASLIYEKFKALNELNMLKVNDSRLSPSQKQDLFNNLFKKQKTIRTKKLQTYIRTNWELPSVMISGLADPDKFNSSLSTYIDFRDIFGEKVDDPNRQADYEEIIEWSTVFEDRKIYQAKLNQLDWLTEPQRKALLTKRYTGWGRLSKKLLTGLKDQNGDSILDQLWKTNDNFMQIQSRDEFAKQIHDENAKQFHEANNVDDILDDAFTSPQNKKAIRQVDKVVQDVVKAVGYAPDKIAIEFTRSLENNPQRTVSRQRQLQAAYKNIPREIMKSGLMAELGSVADSKKVLSDKLYLYFTQMGKDMYEDKTINIDNLPNYDIDHILPQAFIKDDSIDNRVLISKEENARKSNRVPLKFFGAKRMGFWKDLLNNGLISNRKFQNLTTDPEKISKYSAKGFIHRQLVETSQVIRLVANILGNEYSQAGTTIIEVSAKMNRQLREDFHLIKNRNVNDYHHAMDAYLTAYVGDYLYLRYPKLRPYFVYGDFKKAEDQDLNIRNFNFLHDLKDNESLDKIVDSETGEIVWEKHGSVKQLKKVYHYKFMLVSQEVYTRQDALFNQTIYPASDADKRKLIPIKNSKPVDVYGGYSGNIDAYMAIVRVHGKKEDNYKVVGIPMRAVTKLKKAEKEGHDSYLNAVHEVLKPQFTKKKKNRKTGEITETVDEFDVLLGKVYYRQLIVDGNKKFMLGSSSYQYNAKQLVLSDKAMQVLSKNGKVKSQDENQNLIDVYDEILEKVDQYFELYDQRHYRESLHKGRGIFVNLPLSNQYDGSKLTSYGKYETIDAILNGLHANATMSNLRYLGISSPFGKMQASNGLTIDPDSIICYQSPTGLFERQIKLSDL

SEQ ID NO: 258 - protein, 1371 aa, Lactobacillus buchneri
MKVNNYHIGLDIGTSSIGWVAIGKDGKPLRVKGKTAIGARLFQEGNPAADRRMFRTTRRRLSRRKWRLKLLEEIFDPYITPVDSTFFARLKQSNLSPKDSRKEFKGSMLFPDLTDMQYHKNYPTIYHLRHALMTQDKKFDIRMVYLAIHHIVKYRGNFLNSTPVDSFKASKVDFVDQFKKLNELYAAINPEESFKINLANSEDIGHQFLDPSIRKFDKKKQIPKIVPVMMNDKVTDRLNGKIASEIIHAILGYKAKLDVVLQCTPVDSKPWALKFDDEDIDAKLEKILPEMDENQQSIVAILQNLYSQVTLNQIVPNGMSLSESMIEKYNDHHDHLKLYKKLIDQLADPKKKAVLKKAYSQYVGDDGKVIEQAEFWSSVKKNLDDSELSKQIMDLIDAEKFMPKQRTSQNGVIPHQLHQRELDEIIEHQSKYYPWLVEINPNKHDLHLAKYKIEQLVAFRVPYYVGPMITPKDQAESAETVFSWMERKGTETGQITPWNFDEKVDRKASANRFIKRMTTKDTYLIGEDVLPDESLLYEKFKVLNELNMVRVNGKLLKVADKQAIFQDLFENYKHVSVKKLQNYIKAKTGLPSDPEISGLSDPEHFNNSLGTYNDFKKLFGSKVDEPDLQDDFEKIVEWSTVFEDKKILREKLNEITWLSDQQKDVLESSRYQGWGRLSKKLLTGIVNDQGERIIDKLWNTNKNFMQIQSDDDFAKRIHEANADQMQAVDVEDVLADAYTSPQNKKAIRQVVKVVDDIQKAMGGVAPKYISIEFTRSEDRNPRRTISRQRQLENTLKDTAKSLAKSINPELLSELDNAAKSKKGLTDRLYLYFTQLGKDIYTGEPINIDELNKYDIDHILPQAFIKDNSLDNRVLVLTAVNNGKSDNVPLRMFGAKMGHFWKQLAEAGLISKRKLKNLQTDPDTISKYAMHGFIRRQLVETSQVIKLVANILGDKYRNDDTKIIEITARMNHQMRDEFGFIKNREINDYHHAFDAYLTAFLGRYLYHRYIKLRPYFVYGDFKKFREDKVTMRNFNFLHDLTDDTQEKIADAETGEVIWDRENSIQQLKDVYHYKFMLISHEVYTLRGAMFNQTVYPASDAGKRKLIPVKADRPVNVYGGYSGSADAYMAIVRIHNKKGDKYRVVGVPMRALDRLDAAKNVSDADFDRALKDVLAPQLTKTKKSRKTGEITQVIEDFEIVLGKVMYRQLMIDGDKKFMLGSSTYQYNAKQLVLSDQSVKTLASKGRLDPLQESMDYNNVYTEILDKVNQYFSLYDMNKFRHKLNLGFSKFISFPNHNVLDGNTKVSSGKREILQEILNGLHANPTFGNLKDVGITTPFGQLQQPNGILLSDETKIRYQSPTGLFERTVSLKDL

SEQ ID NO: 259 - protein, 1371 aa, Lactobacillus buchneri
MKVNNYHIGLDIGTSSIGWVAIGEDGKPLRIKGKTAIGARLFQEGNPAADRRMFRTTRRRLSRRKWRLKLLEEIFDPYITPVDSTFFARLKQSNLSPKDSRKEFKGSMLFPDLTDMQYHKDYPTIYHLRHALMTQDEKFDIRMVYLAIHHIVKYRGNFLNSTPVDSFKASKVNFVDQFKKLNELYTAINPEESFQINLANSEDIGHQFLDPSIRKFDKKKQIPKIVPVSVDDKATDKINGKIASEIINAILGYKSKLDVVVQCTPVDSKSWALKFDEEDIDAKLQKILPEMDENQQSIIAILQNLYSQVTLNQIVPNGMSLSESMIEKYNDHHDHLKLYKKIIDQLADPKKKAALKKAYSQYVGDDGKVIEQADFWSSVKKNLDDSDLSKQIMDLIDAEKFMPKQRTSQNGVIPHQLHQRELDEIIEHQSKYYPWLAEINPNKHDLHLAKYKIEELVAFRVPYYVGPMITPDDQAKSAETVFSWMERKGKEAGQITPWNFDEKVDRNASANRFIKRMTTKDTYLIGEDVLPDESLLYEKFKVLNELNMVRVNGKLLKVADKQAIFQDLFENYKHISVKKLQNYIKSKTGLPSDPEISGLSDPEYFNNSLGTYNDFKKLFGNKVDEPDLQDDFEKIVEWSTVFEDKRILREKLNEITWLSDQQKDVLESSRYQGWGRLSKKLLTGIVNDQGERIIDELWNTNKNFMQIQSDNDFAKRIHEANADQMKAVDVEDVLADAYTSPQNKKAIRQVVKVVDDIQKAMGGVAPKYISIEFTRSEDRNPRRTISRQRQLENTLKDTAKSLAKSINPELLSELDNAAKSKKGLTDRLYLYFTQLGKDIYTGKPINIDEISTYDIDHILPQAFVKDDSLNNRVLVSKAINNGKSDNVPVQLFGAKMGHFWKQLAEAGLISKRKLKNLQTDPDTISKYAMHGFIRRQLVETSQVIKLVANILGDKYRNDNTKIIEITARMNHQMRDEFGFIKNREINDYHHAFDAYLTAFLGRYLYHRYIKLRPYFVYGDFKKFKEDKVTMRNFNFLHDLTDDTQEKIADAETGEVIWDRENSIQQLKDVYHYKFMLISHEVYTLRGAMFNQTVYPASDAGKRKLIPIKADRPINVYGGYSGSADAYMAIVRIHNKKGDKYRVVGVPMRARDRLDAAKKVSDADCDRALKDVLTPQLTKTKKSRKTGEITQVVEDFEIVLGKVMYRQLMIDGDKKFMLGSSTYQYNAKQLVLSDQSVKTLASKGRLDPLQESMDYNNVYTEILDKVNQYFSLYDMNKFRHKLNLGFSKFISFPNHNVFDGNTKASSGKREILEEVLNGLHANPTFGNLKDIGITTPFGQLQQPNGILLSDEAKIRYQSPTGLFERTVSLKDL

SEQ ID NO: 260 - protein, 1361 aa, Lactobacillus casei
  source 1..1361: note = BL23
MTKLGKPYGIGVDIGSNSIGFAAVDENSHLIRLKGKTVIGARLFEEGKAAADRRASRTTRRRLSRNRWRLSFLRDFFESHITPTGPNFFMRQKYSEISPKDKARYKYEKRLFNDRTDAEFYQQYPTMYHLRNRLLTDPSKADVREIYFAIHHILKSRGHFLTSGYAKDFNTNKVALNEIFPALQDAYAQVYPDLDITFDENKVNEFKTVLLNEKATPSDTQRALVNLLLAEDGDKDILKQQKQVLTEFAKAVVGLKTKLNVALGTEVDSSEATVWNFSLGQLDDKWAGIESAMTDEGTEILDQIRDLYRARLLNGIVPAGKTLSQAKVDDYAQHHEDLELFKDYLKQLEDDGTAKAIRQLYDRYIDGDDAKPFVREDFVKALTKEVTAHPNAKSPELLERLAQPDFMLKQRNKANGAIPVQMQQRELDQIIKNQSVYYDWLAAPNPVEKHRKSMPYQLDELLNFRIPYYVGPLVTAKEQKAAQGGVFAWMVRKDPDGNITPYNFDEKVDREASANTFIQRMKTTDTYLIGEDVLPKQSLLYQRYEVLNELNNVRVNNEKLSIEQKQQVIRELFERHNSVTIKQFAENLRAHGDYAHIPEIRGLADEKRFLSSLSTYRQLKSLLPDAIDDPAKQADIENIIAWSTVFEDAAIFKTKLKEINWLDSQTITKLSNIRYRGWGQFSHKFLNGLTLGNGHTIIQELFLSNNNLMQILTDETLQKKMTELNADKLKAANINDAIDDAYTSPSNKKALRQVLRVIEDIKRAADGQDPSWLYVETADGGGTPGKRTRARQHQLQEIYANAAHELIDSAVRGELEDKIADKADFNDRLVLYFMQGGRDIYTGTPLNIDQLSSYDIDHILPQSLIKDNSLDNRVLVHAIINREKNATFASTIYAQKMNATWRQWHEAGLISGRKLRNLQMRPDQIDKYASGFVARQLVETRQIIKLTEQIVAAQYPETKIIAVKAGLSHQLREELEFPKNRDVNHYHHAFDAFLAARIGTYLLKRFPNLQAFFTYGKFKKADVKKLRGFNFIRDITHAEDKIVVKDTGEVIWDKKRDVDELDRIYNFKRMLITHEVHFEKADLFKQTVYGAKDSKEAGGKKQLISKKKGYPVDIYGGYTQETGSYLSVVRLTKKAMYAVVKVSTRDAAKLAVAKSISEQKENETLNDIIDEKLSKISKNGKITHELFEVVLPRVGQKTLFKNSKYNLFLVNSDTYMHNYQELWMPREYQKMWKDISLSKYGDAQTEDQLDQIFGFIVSQVNSYFNLYDINQFRKKLNDAADKFATLPMRDTDDMQGKIATIGQLLIGLQANAARSDLRNLDIKTPLGLLQIPNGISLDSDTSVVYQSPTGLLEREVHLSDL

SEQ ID NO: 261 - protein, 1361 aa, Lactobacillus casei
  source 1..1361: note = Lc-10
MTKLGKPYGIGVDIGSNSIGFAAVDENSHLIRLKGKTVIGARLFEEGKAAADRRASRTTRRRLSRNRWRLSFLRDFFESHITPTGPNFFMRQKYSEISPKDKARYKYEKRLFNDRTDAEFYQQYPTMYHLRNRLLTDPSKADVREIYFAIHHILKSRGHFLTSGYAKDFNTNKVALNEIFPALQDAYAQVYPDLDITFDENKVNEFKTVLLNEKATPSDTQRALVNLLLAEDGDKDILKQQKQVLTEFAKAVVGLKTKLNVALGTEVDSSEATVWNFSLGQLDDKWAGIESAMTDEGTEILDQIRDLYRARLLNGIVPAGNTLSQAKVDDYAQHHEDLELFKDYLKQLEDDGTAKAIRQLYDRYIDGDDAKPFVREDFVKALTKEVTAHPNAKSPELLERLAQPDFMLKQRNKANGAIPVQMQQRELDQIIKNQSVYYDWLAAPNPVEKHRKSMPYQLDELLNFRIPYYVGPLVTAKEQKAAQGGVFAWMVRKDPDGNITPYNFDEKVDREASANTFIQRMKTTDTYLIGEDVLPKQSLLYQRYEVLNELNNVRVNNEKLSIEQKQQVIRELFERHNSVTIKQFAENLRAHGDYAHIPEIRGLADEKRFLSSLSTYRQLKSLLPDAIDDPAKQADIENIIAWSTVFEDAAIFKTKLKEINWLDSQTITKLSNIRYRGWGQFSHKFLNGLTLGNGHTIIQELFLSNNNLMQILTDETLQKKMTELNADKLKAANINDAIDDAYTSPSNKKALRQVLRVIEDIKRAADGQDPSWLYVETADGGGTPGKRTRARQHQLQEIYANAAHELIDSAVRGELEDKIADKADFNDRLVLYFMQGGRDIYTGTPLNIDQLSSYDIDHILPQSLIKDNSLDNRVLVHAIINREKNATFASTIYAQKMNATWRQWHEAGLISGRKLRNLQMRPDQIDKYASGFVARQLVETRQIIKLTEQIVAAQYPETKIIAVKAGLSHQLREELEFPKNRDVNHYHHAFDAFLAARIGTYLLKRFPNLQAFFTYGKFKKADVKKLRGFNFIRDITHAEDKIVVKDTGEVIWDKKRDVDELDRIYNFKRMLITHEVHFEKADLFKQTVYGAKDSKEAGGKKQLISKKKGYPVDIYGGYTQETGSYLSVVRLTKKAMYAVVKVSTRDAAKLAVAKSISEQKENETLNDIIDEKLSKISKNGKITHELFEVVLPRVGQKTLFKNSKYNLFLVNSDTYMHNYQELWMPREYQKMWKDISLSKYGDAQTEDQLDQIFGFIVSQVNSYFNLYDINQFRKKLNDAADKFATLPMRDTDDMQGKIATIGQLLIGLQANAARSDLRNLDIKTPLGLLQIPNGISLDSDTSVVYQSPTGLLEREVHLSDL

SEQ ID NO: 262 - protein, 1363 aa, Lactobacillus casei
  source 1..1363: note = M36
MTKLGKPYGIGVDIGSNSIGFAAVDENSHLIRLKGKTVIGARLFEEGKAAADRRASRTTRRRLSRNRWRLSFLRDFFESHITPTDPNFFMRQKYSEISPKDKARYKYEKRLFNDRTDAEFYQQYPTMYHLRNRLLTDPSKADVREIYFAIHHILKSRGHFLTSGYAKDFNTNKVALNEIFPALQDAYAQVYPDLDITFDENKVNEFKTVLLDEKATPSDTQRALVNLLLAEDGDKDILKQQKQVLTEFAKAVVGLKMKLNVALGTEVDSSEATAWNFSLGQLDDKWAGIESAMTDEGTEILDQIRDLYRARLLNGIVPAGKTLSQAKVDDYEQHHEDLELFKDYLKQLEDDGMAKVIRQLYDRYIDGDDAKPFVREDFVKALTKEVTAHPNAKSPELLERLVQPDFMLKQRNKANGAIPVQMQQRELDQIIKNQSVYYDWLAAPNPVEKHRQSMPYQLDELLNFRIPYYVGPLVTAKEQKAAQGGVFAWMVRKDPDGNITPYNFDEKVDREASANTFIQRMKTTDTYLIGEDVLPKQSLLYQSYEVLNELNNVRVNDNKLSFDQKQQVLGELFERHNTVTIKQFVDNLLAHGDYDRIPEVRGLADEKRFLSSLSTYNQLKGILHEAIDDSDKQTDIEKIIAWSTIFEDKAIFKTKLNEISWLTAGMINSLANIRYRGWGQFSHKLLNELTLSTGRTVFEELLISSHNLMQILTDEVLKQKIAELNAHELKASGIYAAIDDAYTSPSNKKALRQVLSVIDDITNAAGQAPNWLYIETADGDGVPGKRTNSRQRKIQEIYANAAQELITGSVRGELEDKIASRADFTDRLVLYFMQGGRDIYTGEPLNIDNLSSYDIDHILPQSLIKDNSLDNRVLVHPLVNREKDTIFASTRFAKQMNGMWRQWHAAGLISSRKLRNLQMRPDEIDKYASGFVARQLVETRQIIKLTEQIVADQYPDAKIIAVKAGLSSQLRKELDFPKNREVNHYHHAFDAFLAARIGTYLLKRYPNLEPFFTYGKFKKTEVKKLKSLKSFNFIRDMTHAKDKIVAKETGEIVWDNASDINELDRIYNFKRMLITHEVRFETASLFKQTLYAAKNSKNRGGSRQLIPKKKGYLVDIYGGYTQETGSYLSVVRLTKKAMYAVVKVSTRDAAKLAVAKSISEQKENETLKKIIDGKLSKTSKKGKTTHQLFEIVLPRVGQKTLFKNSKYNQFLVNSDTYMHNYQELWMPREYQRMWKDILLSNHGDAQLEGQLDQIFKFIVSQVNSYFNLYDINQFRKKIADATDKFAKLPTHDTDNARGKIATIGQLLIGLQANAMRSDLRNLDIKTPFGLLQIGTGITLDLDTSIIYQSPTGLFEREVPLTDL

SEQ ID NO: 263 - protein, 1361 aa, Lactobacillus casei; identical to SEQ ID NO: 260

SEQ ID NO: 264 - protein, 1360 aa, Lactobacillus casei
  source 1..1360: note = T71499
MTKLGKPYGIGVDIGSNSIGFAAVDENSHLIRLKGKTVIGARLFEEGKAAADRRASRTTRRRLSRNRWRLSFLRDFFESHITPTDPNFFMRQKYSEISPKDKARYKYEKRLFNDRTDAEFYQQYPTMYHLRTRLLTDPSKADVREIYFAIHHILKSRGHFLTPGYAKDFNTNKVALNEIFPALQDAYAQVYPDLDITFDENKVNEFKTVLLNEKATPSDTQRALVNLLLAEDGDKDILKQQKQVLTEFAKAVVGLKTKLNVALGTEVDSSEATVWNFSLGQLDDKWAGIESAMTDEGTEILDQIRDLYRARLLNGIVPAGKTLSQAKVDDYAQHHEDLELFKDYLKQLEDDGTAKAIRQLYDRYIDGDDAKPFVREDFVKALTKEVTAHPNAKSPELLERLAQPDFMLKQRNKANGAIPVQMQQRELDQIIKNQSVYYDWLAAPNPVEKHRKSMPYQLDELLNFRIPYYVGPLVTAKEQKAAQGGVFAWMVRKDPDGNITPYNFDEKVDREASANTFIQRMKTTDTYLIGEDVLPKQSLLYQSYEVLNELNNVRVNDNKLSFDQKQQVLGELFERHNTVTIKQFVDNLLAHGDYDRIPEVRGLADEKRFLSSLSTYNQLKGILHEAIDDADKQTDIENIIAWSTIFEDKAIFKTKLNEISWLNAGMINSLANIRYRGWGQFSHKLLNELTLSTGRTVFEELLISSRNLMQILTDEVLKQKIAELNAHELKASGIYAAIDDAYTSPSNKKALRQVLSVIDDITNAAGQAPNWLYIETADGDGVPGKRTNSRQRKIQEIYANAAQELITGSVRGELEDKIASRADFTDRLVLYFMQGGRDIYTGEPLNIDNLSSYDIDHILPQSLIKDNSLDNRVLVHPLVNREKDTIFASTRFAKQMNGMWRQWHAAGLISSRKLRNLQMRPDEIDKYASGFVARQLVETRQIIKLTEQIVADQYPDTKIIAVKAGLSSQLRKELDFPKNREVNHYHHAFDAFLAARIGTYLLKRYPNLEPFFTYGKFKKTEVKKLKSFNFIRDMTHAKDKIVAKETGEIVWDNASDINELDRIYNFKRMLITHEVRFETASLFKQTLYAAKNSKNRGGSRQLIPKKKGYLVDIYGGYTQETGSYLSVVRLTKKAMYAVVKVSTRDAAKLAVAKSISEQKENETLKKIIDGKLSKTSKKGKTTHQLFEIVLPRVGQKTLFKNSKYNQFLVNSDTYMHNYQELWMPREYQRMWKDILLSNHGDAQLEGQLDQIFKFIVSQVNSYFNLYDINQFRKKIADATDKFAKLPTHDTDNARGKIATIGQLLIGLQANAMRSDLRNLDIKTPFGLLQIGTGITLDLDTSIIYQSPTGLFEREVPLTDL

SEQ ID NO: 265 - protein, 1366 aa, Lactobacillus casei
  source 1..1366: note = UCD174
MTKLGKPYGIGVDIGSNSIGFAAVDENSHLIRLKGKTVIGARLFEEGKAAAYRRASRTTRRRLSRNRWRLSFLRDFFESHITPTDPNFFMRQKYSEISPKDKARYKYEKRLFNDRTDAEFYQQYPTMYHLRTRLLTDPSKADVREIYFAIHHILKSRGHFLTPGYAKDFNTNKVALNEIFPALQDAYAQVYPDLDITFDENKVNEFKTVLLNEKATPSDTQRALVNLLLAKEGDRDILKQQKQVLTEFAKAVVGLKTKLNVALGTEVDSSEATAWNFSLGQLDDKWAGIESAMTDEGTEILDQIRDLYRARLLNGIVPAGKTLSQAKVDDYAQHHEDLELFKDYLKQLEDDGTAKAIRQLYDRYIDGDDAKPFVREDFVKALTKEVTAHPNAKSPELLERLAQPDFMLKQRNKANGAIPVQMQQRELDQIIKNQAVYYDWLAAPNPVEKHRQSMTYQLDELLNFRIPYYVGPLVTAKEQKAAQGGVFAWMVRKDPDGNITPYNFDEKVDREASANTFIQRMKTTDTYLIGEDVLPKQSLLYQSYEVLNELNNVRVNDNKLSFDQKQQVLGELFERHNTVTIKQFVDNLLAHGDYDRIPEVRGLADEKRFLSSLSTYNQLKGILHEAIDDADKQTDIENIIAWSTIFEDKAIFKTKLNEISWLNAGMINSLANIRYRGWGQFSHKLLNELTLSTGRTVFEELLISSRNLMQILTDEVLKQKIAELNAHELKASGIYAAIDDAYTSPSNKKALRQVLSVIDDITNAAGQAPNWLYIETADGDGVPGKRTNSRQRKIQEIYANAAQELITGSVRGEFEDKIASRADFTDRLVLYFMQGGRDIYTGEPLNIDNLSSYDIDHILPQSLIKDNSLDNRVLVHPLVNREKDTIFASTRFAKQMNGMWRQWHAAGLISSRKLRNLQMRPDEIDKYASGFVARQLVETRQIIKLTEQIVADQYPDTKIIAVKAGLSSQLRKELDFPKNREVNHYHHAFDAFLAARIGTYLLKRYPNLEPFFTYGKFKKTEVKKLKSLKSLKSFNFIRDMTHAKDKIVAKETGEIVWDNASDINELDRIYNFKRMLITHEVRFETASLFKQTLYAAKNSKNRGGSRQLIPKKKGYLVDIYGGYTQETGSYLSVVRLTKKAMYAVVKVSTRDAAKLAVAKSISEQKENETLKKIIDGKLSKTSKKGKTTHQLFEIVLPRVGQKTLFKNSKYNQFLVNSDTYMHNYQELWMPREYQRMWKDILLSNHGDAQIEGQLDQIFKFIVSQVNSYFNLYDINQFRKKIADATDKFAKLPTHDTDNARGKIATIGQLLIGLQANAMRSDLRNLDIKTPFGLLQIGTGITLDLDTSIIYQSPTGLFEREVPLTDL

SEQ ID NO: 266 - protein, 1389 aa, Lactobacillus casei
MIIRTYELKTITTIAILKMFQLLTGGLSMTKLGKPYGIGVDIGSNSIGFAAVDENSHLIRLKGKTVIGARLFEEGKAAADRRASRTTRRRLSRNRWRLSFLRDFFESHITPTGPNFFMRQKYSEISPKDKARYKYEKRLFNDRTDAEFYQQYPTMYHLRNRLLTDPSKADVREIYFAIHHILKSRGHFLTSGYAKDFNTNKVALNEIFPALQDAYAQVYPDLDITFDENKVNEFKTVLLNEKATPSDTQRALVNLLLAEDGDKDILKQQKQVLTEFAKAVVGLKTKLNVALGTEVDSSEATVWNFSLGQLDDKWAGIESAMTDEGTEILDQIRDLYRARLLNGIVPAGKTLSQAKVDDYAQHHEDLELFKDYLKQLEDDGTAKAIRQLYDRYIDGDDAKPFVREDFVKALTKEVTAHPNAKSPELLERLAQPDFMLKQRNKANGAIPVQMQQRELDQIIKNQSVYYDWLAAPNPVEKHRKSMPYQLDELLNFRIPYYVGPLVTAKEQKAAQGGVFAWMVRKDPDGNITPYNFDEKVDREASANTFIQRMKTTDTYLIGEDVLPKQSLLYQRYEVLNELNNVRVNNEKLSIEQKQQVIRELFERHNSVTIKQFAENLRAHGDYAHIPEIRGLADEKRFLSSLSTYRQLKSLLPDAIDDPAKQADIENIIAWSTVFEDAAIFKTKLKEINWLDSQTITKLSNIRYRGWGQFSHKFLNGLTLGNGHTIIQELFLSNNNLMQILTDETLQKKMTELNADKLKAANINDAIDDAYTSPSNKKALRQVLRVIEDIKRAADGQDPSWLYVETADGGGTPGKRTRARQHQLQEIYANAAHELIDSAVRGELEDKIADKADFNDRLVLYFMQGGRDIYTGTPLNIDQLSSYDIDHILPQSLIKDNSLDNRVLVHAIINREKNATFASTIYAQKMNATWRQWHEAGLISGRKLRNLQMRPDQIDKYASGFVARQLVETRQIIKLTEQIVAAQYPETKIIAVKAGLSHQLREELEFPKNRDVNHYHHAFDAFLAARIGTYLLKRFPNLQAFFTYGKFKKADVKKLRGFNFIRDITHAEDKIVVKDTGEVIWDKKRDVDELDRIYNFKRMLITHEVHFEKADLFKQTVYGAKDSKEAGGKKQLISKKKGYPVDIYGGYTQETGSYLSVVRLTKKAMYAVVKVSTRDAAKLAVAKSISEQKENETLNDIIDEKLSKISKNGKITHELFEVVLPRVGQKTLFKNSKYNLFLVNSDTYMHNYQELWMPREYQKMWKDISLSKYGDAQTEDQLDQIFGFIVSQVNSYFNLYDINQFRKKLNDAADKFATLPMRDTDDMQGKIATIGQLLIGLQANAARSDLRNLDIKTPLGLLQIPNGISLDSDTSVVYQSPTGLLEREVHLSDL

SEQ ID NO: 267 - protein, 1354 aa, Lactobacillus coryniformis
  source 1..1354: note = subsp. coryniformis KCTC 3167
MTLHYNVGLDIGTNSVGYTIVDDNGKILQVKGKNGYGVRVFKEGATAAERRIFRTTHRRLKRRKWRLRLLQDFFEPYILPQDDGFFIRRKESNLVLNDRDEDTASLFNDRSDRDFYQAYPTIYHLRQALMTEKRQFDVREIYLAMHHIIKYRGHFLLNGTVNNFTNNKIDLHSDFEELNALLLNVIPELKFQIDLDHSTMFQTTLLNTTISRSGRQRDLVKSFYNGSDDKQLAKQQKSVATELLKAILGLKAKFHKLFNLDLLETTEWEFSFDAEDIDDKLAKLEPLMTENQQQVMDILQRIFAAITLNGIVPEGKTLSASKVDSYQKHKQDLKLLKAIAQHSDKKTATVLQTAYNEYINGIASKPLKQEDFYKRLTNAVKKSSDPQVADMLALIDQEKFLPKQRTKENGAIPHQLHQLELERIIDNQKDYYPWLAELNPNQARQKVAKYKLSELVAFRVPYYVGPLIEPEVQQATSNAHFAWMARKEAGPITPWNFDQKVDRNVSAERFIKRMTTKDTYLLAEDVLPLHSLLYQRFIVLNELNNVRVNGQKLTKKQKQAVYQDLFKRQPHVTKKQFKSYLVQTGEFAESSKIEGLANETSFNSGLTTENELRKIFGAQLDEARYQVDFEQIIEWATLFEDAKILRTKLAEITWLTTEQIEKLAGIRYRGWGRFSRKLLAGLRDQNGQQIIDLLWDTPNNFMVIVSQAAFSEAITKENEKLIDRRGAQDVITDLYTSPQNKKALRQVLAIVADVQKAMGGVPPQRIFIEFAREDEKNPRRSVERSRQLEKLYQTISNEFLINSEVRQELKEAVDQKVNFKDRLFLYFLQGGVDLYSGKRINIDQLSHYDIDHILPQSFIKDDSLDNRVLVSQKLNRSKSDSVPLSEFANYKFGPAMQAKWLQLKEAGLLSKRKYDNLTLDPTKLSKFAPLGFVNRQLVETRQVIKLAANLLASEETKVVTIKANMTHQVRKELDFPKNRNVNNYHHAFDAYLTAFVGIFLSKRYPKLKPYFTYGDFQKGNKLPDLKNFNFLYELKNKDRSIDSNTGEIIWDKQRDLAYMNKIYNFKKVTVVHEVLTKSGALYNQTLYKASEDKASGRGTKQLIRKKDNMPTELYGGYTGSTSAFMSIVRLWKKDKPYYKVVGIPTRMAAKLANQAQLLDYLTKKFTTRKLVKKTGDYKTTVERFELVVPKVGFNQLVIDGGQPFMLGSATYQYNARELFISKEAVKALNKQLSTHVDLVQVFDEILVQVNRWFPLYDTNGFREKLSHGRDRFMKLNDSFEEKSDTQIDVLNRILIGFHANAARTNLKILGLGTDLGFMTQQAGIRLTEKAILVHQSPSGLFERKVALRDLKGLR

SEQ ID NO: 268 - protein, 1119 aa, Lactobacillus coryniformis
  source 1..1119: note = subsp. torquens KCTC 3535
MGYRIGLDVGITSTGYAVLKTDKNGLPYKILTLDSVIYPRAENPQTGASLAEPRRIKRGLRRRTRRTKFRKQRTQQLFIHSGLLSKPEIEQILATPQAKYSVYELRVAGLDRRLTNSELFRVLYFFIGHRGFKSNRKAELNPENEADKKQMGQLLNSIEEIRKAIAEKGYRTVGELYLKDPKYNDHKRNKGYIDGYLSTPNRQMLVDEIKQILDKQRELGNEKLTDEFYATYLLGDENRAGIFQAQRDFDEGPGAGPYAGDQIKKMVGKDIFEPTEDRAAKATYTFQYFNLLQKMTSLNYQNTTGDTWHTLNGLDRQAIIDAVFAKAEKPTKTYKPTDFGELRKLLKLPDDARFNLVNYGSLQTQKEIETVEKKTRFVDFKAYHDLVKVLPEEMWQSRQLLDHIGTALTLYSSDKRRRRYFAEELNLPAELIEKLLPLNFSKFGHLSIKSMQNIIPYLEMGQVYSEATTNTGYDFRKKQISKDTIREEITNPVVRRAVTKTIKIVEQIIRRYGKPDGINIELARELGRNFKERGDIQKRQDKNRQTNDKIAAELTELGIPVNGQNIIRYKLHKEQNGVDPYTGDQIPFERAFSEGYEVDHIIPYSISWDDSYTNKVLTSAKCNREKGNRIPMVYLANNEQRLNALTNIADNIIRNSRKRQKLLKQKLSDEELKDWKQRNINDTRFITRVLYNYFRQAIEFNPELEKKQRVLPLNGEVTSKIRSRWGFLKVREDGDLHHAIDATVIAAITPKFIQQVTKYSQHQEVKNNQALWHDAEIKDAEYAAEAQRMDADLFNKIFNGFPLPWPEFLDELLARISDNPVEMMKSRSWNTYTPIEIAKLKPVFVVRLANHKISGPAHLDTIRSAKLFDEKGIVLSRVSITKLKINKKGQVATGDGIYDPENSNNGDKVVYSAIRQALEAHNGSGELAFPDGYLEYVDHGTKKLVRKVRVAKKVSLPVRLKNKAAADNGSMVRIDVFNTGKKFVFVPIYIKDTVEQVLPNKAIARGKSLWYQITESDQFCFSLYPGDMVHIESKTGIKPKYSNKENNTSVVPIKNFYGYFDGADIATASILVRAHDSSYTARSIGIAGLLKFEKYQVDYFGRYHKVHEKKRQLFVKRDE

SEQ ID NO: 269 - protein, 1368 aa, Lactobacillus curvatus
  source 1..1368: note = CRL 705
MSRPYNIGLDIGTSSIGWSVVDDQSKLVSVRGKYGYGVRLYDEGQTAAERRSFRTTRRRLKRRKWRLGLLREIFEPYITPIDDTFFLRQKQSNLSPKDQRKLYTQTSLFNDRTDRAFYDDYPTIYHLRYRLMTEKRQFDIREIYLAMHHIVKYRGHFLNEAPVSSFKSSEINLVAHFDRLNTIFADLFSESGFQLETDKLAEVKALLLDNQQSASNRQRQALSLIYTPSTNKAVEKQNKAIATELLKAILGLKAKFNVLTGIEAEDVKAWTLTFNAENFDEEMVKLESSLDDNAHQIIESLQELYSGVLLAGIVPENQSLSQAMITKYDDHQKHLKMLKAVREALAPGDRQRLKQAYDQYVDGQENTKAYSKEDFYGDITKALKNNPDHPIVSEIKKLIELDQFMPKQRTKDNGAIPHQLHQQELDRIIENQQQYYPWLAELNPNSKRQTVAKYKLDELVAFRVPYYVGPLITAEQQRQSSDAKFAWLIRKAEGRITPWNFDDKVDRQASANEFIKRMTTTDTYLLAEDVLPKQSLIYQRFEVLNELNGLKIDDQPITTELKQAIFTDLFMQKISVTVKNIQDYLVSEKRYASRPAITGLSDENKFNSRLSTYHDLKMIVGDAVDDVDKQADLEKCIEWSTIFEDGKIYSAKLNEIDWLTDQQRVQLAAKRYRGWGRLSAKLLTQIVNANGQRIMDLLWDTTDNFMRIVHSEDFDKLITEANQMMLAENDVQDVINDLYTSPQNKKALRQILLVVNDIQKAMKGQAPERILIEFAREDEVNSRLSVQRKRQVEQVYQNISNELLNNTEIRNELKDLSNSALSNTRLFLYFMQGGRDMYTGDSLNIDRLSTYDIDHILPQSFIKDNSLDNRVLVSQKMNRSKADQVPTDFTSVELGQKMQIQWEQMLRAGLITKKKYDNLTLNPDHISKYAMKGFINRQLVETRQVIKLATNLLMEQYGEDNIELITVKSGLTHQMRTEFDFPKNRNLNNHHHAFDAYLTAFVGLYLLKRYPKLKPYFVYGEYQKASQQDKWRNFNFLNGLKKDELVDENTEAVIWDKESGLAYLNKIYQFKKILVTRGVHENSGALFNQTLYAAKDDKASGQGGKQLIPAKQDRSTALYGGYSGKTVAYMCIVRIKNKKGDLYKVCGVETSWLAQLKQLTDEDSQKAFLEQKISPQFTKVKKQKGNIIEAVEEFEVIAPHILINQRFFDNGQELTLGSATYKHNEQELILDKTAVKLLNGALPLTQSEELAEQVYDEILDQVMHYFPLYDTNQFRAKLSTGKAAFMKLPWKSQWDGNKMVQVGQQVILDRILIGLHANAAMSDLKVLKMTTPFGMIQQSTGITLSADTQIIYQSPTGLFERRVALRDL

SEQ ID NO: 270 - protein, 1126 aa, Lactobacillus farciminis
  source 1..1126: note = KCTC 3681
MADRISLGLDIGVASVGFSVLDIDKGKVIELGARLFSATVAAGNQDRRDMRGARRLLNRNKQRRQDTGKLFKKFGLIDDFDKGSFYDNFNQNLNPYELRVKGLTEQLTKEELAESLYQIVKHRGISYALKDADVDEGGTDYSVSLKINSQELAEKTPAQIQLQRLNDYGKVRGQVVIGDDPDNQKVLLNVFPTSAYEKEAKQIIATQQQFYPESLTDKFTEEYCQILTRKRDYFVGPGNEKSRTDYGIYKTDGRTLDNLFEELIGHDKIYPEELRASAASYTAQLFNVLNDLNNLRILNYEDGKLTKEDKEKIIAEIKNNTTTINMLNVIKKVAGCSKDDIKGFRVNEKDKPEISSMPVYRKIHKDLLKAGVDISDWPVEFIDELSFILTLNTENGEIRKQLNNRLAPKFDFLNADLIQLIIDNKDSFEIKTNNKWHRFSVKTMNKLIPEMMERPVEQMTLLNEMGLVKKDKKRFENNKYLPYKEIAKDIFNPVASKSVREALKIVNAVLKKYGHIDYLVVEMPRDKNLKEEQDNIKEFQNKNKKAKDAAFEAFVKSVGSEQRVKEALSKNRKLQMKMRLWYQQQEIDPYNGKTIDATDLINNPDKFEIDHIIPQSISFYDSINNKTLCFASMNQVKGQKTPYEFMLEGHGQSYDKFKATVMANKNFGKAKRANYLFEENVSDIETRKRFLSRNLVDTRYSSRVVLNSLQDFFREKSADTKVTVIRGKFTSNMRKHWHIDKTRETFHHHAIDASIIAATPFLRMWKKGGTIFPVKVGEESIDIETGEILDDKNFDKAMYEEPYSGFVSEIMNADDRIKFSHQVDKKMNRKVSDATIYSTRTGKLAKDKKDAEYIVAKVKDIYSVDGFKKFKKVYDKDKTKFLLYKYDPRTFSKLERIISDCPDKVEKVQTNGKVKAVDISPFEMYRRDHGMIKKYSKKGNGPAIKQLKYLDKKLGSHIDITPANANGKHVILQSLKPWRTDVYLNHETGEYEIMGIKYSDLKFNKNEGYGIKKDKYLEIKKVEEVSEKSEFMFSLYRKDRVKVQDMKTGESVELLFWSRNFSNKKYAELKPISQAENDKKLPVYGKGRLIKRLIPKNCKIWKVNTTILGDPYYLEKESDSPKDILD

SEQ ID NO: 271 - protein, 1356 aa, Lactobacillus farciminis
  source 1..1356: note = KCTC 3681
MTKKEQPYNIGLDIGTSSVGWAVTNDNYDLLNIKKKNLWGVRLFEEAQTAKETRLNRSTRRRYRRRKNRINWLNEIFSEELAKTDPSFLIRLQNSWVSKKDPDRKRDKYNLFIDGPYTDKEYYREFPTIFHLRKELILNKDKADIRLIYLALHNILKYRGNFTYEHQKFNISNLNNNLSKELIELNQQLIKYDISFPDDCDWNHISDILIGRGNATQKSSNILKDFTLDKETKKLLKEVINLILGNVAHLNTIFKTSLTKDEEKLNFSGKDIESKLDDLDSILDDDQFTVLDAANRIYSTITLNEILNGESYFSMAKVNQYENHAIDLCKLRDMWHTTKNEEAVEQSRQAYDDYINKPKYGTKELYTSLKKFLKVALPTNLAKEAEEKISKGTYLVKPRNSENGVVPYQLNKIEMEKIIDNQSQYYPFLKENKEKLLSILSFRIPYYVGPLQSAEKNPFAWMERKSNGHARPWNFDEIVDREKSSNKFIRRMTVTDSYLVGEPVLPKNSLIYQRYEVLNELNNIRITENLKTNPIGSRLTVETKQRIYNELFKKYKKVTVKKLTKWLIAQGYYKNPILIGLSQKDEFNSTLTTYLDMKKIFGSSFMEDNKNYDQIEELIEWLTIFEDKQILNEKLHSSKYSYTPDQIKKISNMRYKGWGRLSKKILMDITTETNTPQLLQLSNYSILDLMWATNNNFISIMSNDKYDFKNYIENHNLNKNEDQNISDLVNDIHVSPALKRGITQSIKIVQEIVKFMGHAPKHIFIEVTRETKKSEITTSREKRIKRLQSKLLNKANDFKPQLREYLVPNKKIQEELKKHKNDLSSERIMLYFLQNGKSLYSEESLNINKLSDYQVDHILPRTYIPDDSLENKALVLAKENQRKADDLLLNSNVIDRNLERWTYMLNNNMIGLKKFKNLTRRVITDKDKLGFIHRQLVQTSQMVKGVANILDNMYKNQGTTCIQARANLSTAFRKALSGQDDTYHFKHPELVKNRNVNDFHHAQDAYLASFLGTYRLRRFPTNEMLLMNGEYNKFYGQVKELYSKKKKLPDSRKNGFIISPLVNGTTQYDRNTGEIIWNVGFRDKILKIFNYHQCNVTRKTEIKTGQFYDQTIYSPKNPKYKKLIAQKKDMDPNIYGGFSGDNKSSITIVKIDNNKIKPVAIPIRLINDLKDKKTLQNWLEENVKHKKSIQIIKNNVPIGQIIYSKKVGLLSLNSDREVANRQQLILPPEHSALLRLLQIPDEDLDQILAFYDKNILVEILQELITKMKKFYPFYKGEREFLIANIENFNQATTSEKVNSLEELITLLHANSTSAHLIFNNIEKKAFGRKTHGLTLNNTDFIYQSVTGLYETRIHIE

SEQ ID NO: 272 - protein, 1313 aa, Lactobacillus fermentum
  source 1..1313: note = 28-3-CHN
MHYLDEIFAPHLQEVDENFLRRLKQSNIHPEDPAKNQAFIGKLLFPDLLKKNERGYPTLIKMRDELPVEQRAHYPVTNIYKLREAMINEDRQFDLREVYLAVHHIMKYRGHFLNNASVDKFKVGRIDFYKSFNVLNEAYEELQNGEGSFTIEPSKVEKIGQLLLDTKMRKLNRQKAVAKLLEVKVADKEETKRNKQIATAMSKLVLGYKADFATVAMANGNEWKIDLSSETSEDEIEKFREELSDAQNDILTEITSLFSQIMLNEIVPNGMSISESMMDRYWTHERQLAEVKEYLATQPASARKEFDQVYNKYIGQAPKERGFDLEKGLKKILSKKENWKEIDELLKAGDFLPKQRTSANGVIPHQMHQQELDRIIEKQAKYYPWLATENPATGERDRHQAKYELDQLVSFRIPYYVGPLVTPEVQKATSGAKFAWAKRKEDGEITPWNLWDKIDRAESAEAFIKRMTVKDTYLLNEDVLPANSLLYQKYNVLNELNNVRVNGRRLSVGIKQDIYTELFKKKKTVKVSDVASLVMAKTRGVNKPSVEGLSDPKKFNSNLATYLDLKSIVGDKVDDNRYQTDLENIIEWRSVFEDGEIFADKLTEVEWLTDQQRSALVKKRYKGWGRLSKKLLTGIVDENGQRIIDLMWNTDQNFMQIVNQPVFKEQIDQLNQKAITNDGMTLREWVESVLDGAYTSPQNKKAIWQVVRVVEDIVKAVGNAPKSISIEFARNEGNKGEITRSRRTQLQKLFEDQAHELVKDTSLTEELEKAPDLSDRYYLYFTQGGKDMYTGDPINFDEISTKYDIDHILPQSFVKDDSLDNRVLVSRAENNKKSDRVPAKLYAAKMKPYWNQLLKQGLITQRKFENLTMDVDQNIKYRSLGFVKRQLVETRQVIKLTANILGSMYQEAGTDIIETRAGLTKQLREEFDLPKVREVNDYHHAVDAYLTTFAGQYLNRRYPKLRSFFVYGEYMKFKHGSDLKLRNFNFFHELMEGDKSQGKVVDQQTGELITTRDEVAKSFDRLLNMKYMLVSKEVHDRSDQLYGATIVTAKESGKLTSPIEIKKKRPVDLYGAYTNGTSAFMTIIKFTGNKPKYKVIGVPTTSAVGLKRVGKPGSESYNQELHRIIKSNPKVKKDFEIVVPHVSYSQLIVDDDCKFTLASDTYQHPATQLVLSKESMEIIADDFKFVKENTATADEQLVRVFDEIVNQMNHYFTIFDQRSNRQKVTKARDKFVSLPTESEYEGAKKTQVGKTEVITNLLMGLHANSAQGDLKVLGLSTFGFFQSSGGLNLSEDAMIVYQSPTGLFERRICLKDI

SEQ ID NO: 273 - protein, 1381 aa, Lactobacillus fermentum
  source 1..1381: note = ATCC 14931
MDYVKEYHIGLDIGTSSIGWAVTDSQFKLMRIKGKTAIGVRLFEEGKTAAERRTFRTTRRRLKRRKWRLHYLDKIFAPHLQEVDENFLRRLKQSNIHPEDPAKNQAFIGKLLFPDLLKKNERGYPTLIKMRDELPVEQRAHYPVTNIYKLREAMINEDRQFDLREVYLAVHHIVKYRGHFLNNASVDKFKVGRIDFDKSFNVLNEAYEELQNGEGSFTIEPSKVEKIGQLLLDTKMRKLDRQKAVAKLLEVKVADKEETKRNKQIATAMSKLVLGYKADFATVAMANGNEWKIDLSSETSEDEIEKFREELSDAQNDILTEITSLFSQIMLNAIVPNGMSISESMMDRYWTHERQLAEVKEYLATQPASARKEFDQVYNKYIGQVPKEKGFDLEKGLKKILSKKENWKEIDELLKAGDFLPKQRTSANGVIPHQMHQQELDRIIEKQAKYYPWLATENPATGERDRHQAKYELDQLVSFRIPYYVGPLVTPEVQKATSGAKFAWAKRKEDGEITPWNLWDKIDRAESAEAFIKRMTVKDTYLLNEDVLPANSLLYQKYNVLNELNNVRVNGRRLSVGIKQDIYTELFKKKKTVKAGDVASLVMAKTRGVNKPSVEGLSDPKKFNSNLATYLDLKSIMGDKVDDNRYQMDLENIIEWRSVFEDGEIFADKLTEVEWLTDEQRSALVKKRYKGWGRLSKKLLTGIVDENGQRIIDLMWNTDQNFMQIVNQPVFKEQIDQLNQKAITNDGMTLRERVESVLDDAYTSPQNKKAIWQVVRVVEDIVKAVGNAPKSISIEFARNEGNKGEITRSRRTQLQKLFEDQAHELVKDTSLTEELEKAPDLSDRYYFYFTQGGKDMYTGDPINFDEISTKYDIDHILPQSFVKDDSLDNRVLVSRAENNKKSDRVPAKLYAAKMKPYWNQLLKQGLITQRKFENLTMDVDQNIKYRSLGFVKRQLVETRQVIKLTANILGSMYQEAGTDIIETRAGLTKQLREEFDLPKVREVNDYHHAVDAYLTTFAGQYLNRRYPKLRSFFVYGEYMKFKHGSDLKLRNFNFFHELMEGDKSQGKVVDQQTGELITTRDEVAKSFDRLLNMKYMLVSKEVHDRSDQLYGATIVTAKESGKLTSPIEIKKNRPVDLYGAYTNGTSAFMTIIKFTGNKPKYKVIGVPTTSAVGLKRVGKPGSESYNQELHRIIKSNPKVKKDFEIVVPHVSYSQLIVDGDCKFTLASDTYQHPATQLVLSKESMEIIADDFKFVKENPATADEQLVRVFDEIVNQMNHYFTIFDQRSNRQKVTKARDKFVSLPTESEYEGAKKTQVGKTEVITNLLMGLHANAAQGDLKVLGLSTFGFFQSSGGLNLSEDAMIVYQSPTGLFERRICLKDI

SEQ ID NO: 274 - protein, 1327 aa, Lactobacillus florum
  source 1..1327: note = 2F
MTEQQQPYNIGLDIGTSSIGWAVTDQNDKLLHIRGHNGIGVRLFKEGESAAERRGFRTTRRRLSRRRWRLRFLDRIFDAELAKVDPNFLARLKQSNISPLDPNKQMFGNILFDDPQFDDQKFHQQYPTIYHLRSALAQPDAPQADVRLIYLALHHMIKFRGHFLNGAAVEKFHGGQLHLESEFQELNQIFSNQQRDHVQLQTSSLDEVATILKDNQRTPSDRQRELSARLFVPVDKTIDKENKKLATELLKAVLGLKAKFDVILGVEATDPQAFKLQFSSDDFDDKIAELASELTDEANEILTVLQRLYFSLNLADILTNRQTKQVADSISTAMINRYDDHKHHLKMLKELEAQVTQEQRDGLKKAYDEYIDGDKPTIDTFYTNIKKNLDDSELANQIKSLIDLQAFMPKQRSKENGSIPHQLHQRELDQLIEVQGKYYPWLLAAKDKLDALIAFRVPYYVGPMIDPNQSDDPQNTKFAWMVRKEAGEITPWNFEEKVDKTSSATNFIKRMTTTDTYLLGEPVLPKNSLLYQQFTVLNELNKLKVNGKALTVDQKKYLYEHVCKKQRRVTLKKLSDCLMARGDFPMGAIFTGTTDQKNMNNTLKTYQDFQEIFGDEIDNPDRQVDFEKMIEWSAIFEDREIFKLKLAELNWLTSEQLERVSKKRYQGWGRLSQKLLTHIVNENGERIIDQLWNTNQNFMEIMGQDSVKQAIQEHNGANVAQTGINETIDELYTSPQNKKAIRQILLVVDDIKKAVGYAPANIMMEFAREDRDDHRLIASRARQLEKTYQEISKNWFDNESVTQELKDQIKNKTKFTDRLYLYFIQGGIDLYTGHPLNIDQLSSYDIDHILPQSFLLDNSLNNRVLTSQAENRVHKEDRLPGETVANKMRPTWKMMREQGLMTQRKYNNLTLKPDQISKFNNRGQFINRQLVETRQVIKLAADIMSQKYQADQTKVVTVKANLTHHMREKFNFYKSRNVNDYHHAFDAYLTLFVGNWLLKEYPKLQPYFVYGDFAKTGTNNLKSFNFLYRFERDHKLNDKGAIDTDKDQQLGYMKRIYRFKKMLVTKQLETNEGALYGQTLYPAPKNDKKTRNLINSKKNRPSDIYGGYSNENGSFLTLVKLKKGSKYDYRLVAVPVSKISEIKESELATIEKAIAPQFLKSSGKYRDFQVVLSKILINQKVIDDGMIFTIGSKSYKHNAKQVVLSDNSIQIVSTLSRISDKEKLITVFDEIVDITSKYLPWYKVNDVEKTKMLFRQMQDIDEMKKIIDNSLIGLHCNASITDLGKVGLSKYWGRFVLTAGISLTVDAQLIYQSPTGLFEHRVKVSDL

SEQ ID NO: 275 - protein, 1391 aa, Lactobacillus gasseri
  source 1..1391: note = JV-V03
MTKIKNEYIVGLDVGTNSCGWVAMDFQNTILRMHGKTAIGSHLFDAGNSAADRRAFRTTRRRIKRRKWRLKLLEEIFDPYMTEVDPYFFARLKESGLSPLDKRKNVSSIVFPTALEDKKFYCNYPTIYHLRYDLMSEDKKFDLREIYLAIHHIVKYRGNFLYNTPVKDFEASKIDVKDSLEKLNELYERLDSEFTVELDSSNALEIEKIIRDKKVFKINKVKSIHQLLSLKTENKERTKLIKDVSKQIINAILGYKTKFETILLKNISKDEADDWEFKLTDVDADNKFENLIGDLNENEQEILLEIRNLANAITLSNIVEEGKTLSESMIDKYNKHSDDLELLKQVISDHPDRDKAKKLALAYDLYVNNRHGKLLQAKDVLGSKKTLSKEDFYKEVKKNLDDSKASQEILDTIALDSFMPKQRTNENGVIPYQLHQLELDRIIKNQGKYYPFLKEVNPVSSHLKEAPYKLDELIRFRVPYYVGPLISPNESTKNKQTKKNQNFAWMIRKEQGQITPWNFDQKVDRMASANKFIKRMTTKDTYLLGEDVLPANSLLYQKFTVLNELNNIKINGKRISVPLKEELYNNLFKKNSTVTTNKLKSYLKENYNLINVEIKGLADEKKFNSGLTTYNKLRNLKIFDQQLDDLNYDKDFERIIEWSTIFEDKAIYKDKLKTIKWLSDRQIDKLSKIRMQGWGQLSKKLLSQLTDNNGQTIIEQLWDSQNNFMQIVNQSDFKDAIAVANQNLLVNTSVEDILNEAYTSPANKKAIRQVVKVVDDIVKAASGKVPKQIAIEFTRDADDKAKISQTRANKLRKVYKELSNELASETIRNELERVAKDQKLLKDKYYLYFMQLGRDAYTGEPINIDDLGQYDIDHILPQSFIKDDSLENRVLVKKAVNNGKSDNVPVKLYGNRMAADLGMTIRHMWEKWKDQGLITKTKYNNLIIDPDKINKYESSGFIHRQLVETSQIIKLVSTILQSKYPDTEIIVVKARYNHYLRKHLNLYKSREVNDYHHAIDAYLSAICGNLLYQVYPYLRPFFVYGQYKKFSSDPKKEKIIYDKTRKYNFISQIFENKSNDIISLETKKKVFDKKDIIEKLKHAYNYKYMLVSRETETHDQEMFKMTVYPRLSRDTKKSRNLISKKKDMPTEIYGGYTNNSDAYMVIARINKKKGTEYRVFGVPMRELVNLRKAEKNGRYNAYLKQVLEPEIMYSKNGKKNKTISSFEIVKAKVPYKQVILDGDKKFMLASSTYVQNAKQLTLSQNSMQAITDNCENDTEEEKALEEKALIEAYDEILTNIDKYLPLFDINKFREKLHAGREKFINLSLDVKKDTILQVLNGLHDNAVMPKIKSLGLSTPLGFMQFSSGVPLSENAKLIYQSPTGLFEKRVKISDL

SEQ ID NO: 276 - protein, 1386 aa, Lactobacillus hominis
  source 1..1386: note = CRBIP 24.179
MTKITEDYIVGLDIGTNSCGWVAMDSKNTILRMHGKTAIGSHLFDAGNSAADRRAFRTTRRRIKRRKWRLKLLEEIFDSHLAKVDPYFFARLKESGLSPLDTRKNVSSIIYPTSLEDKKFYVDNPTIYHLRYKLMTEDRKFDLREVYLAIHHIVKYRGNFLYNTPVKAFEASKIDVKGSLKKLNELYEGLDSEFNVELDSNNALEIENIIRDKKIFKINKVKEINQLLSLKTEDKERTKLMKDVSKQIVNAILGYKTKFETILLKDVSKDEADDWEFKLTDVDADNKFENLIGDLNENEQEILLVIRKLANAITLSNIVEEGKTLSESMKDKYKKHSDDLKLLKQVISDHPDRDKAKKLALAYDLYVNNRHGKILQAKDILEKKKTLSKEDFYKEIKKNLDDSKESQEILDAISLDSFMPKQRTNENGVIPYQLHQLELDKIIENQGKYYPFLKEVNPVSSHLKQAPYKLDELIRFRVPYYVGPLISPNESTKNKQTKKNQNFAWMIRKEQGQITPWNFDQKVDRMASANKFIKRMTTIDTYLLGEDVLPANSLLYQKFTVLNELNNVKINGKRISVPLKQELYNNLFKKNSTVTTNKLKSYLKENYKLIKVEIKGLSDEKKFNSGLTTYNKLKNLKIFDQQIDDPNYNKDFERIIEWSTIFEDKAIYKEKLKTIDWLSDRQIDKLSKIRMQGWGQLSKKLLSQLTDNNGQTIIEQLWDSQNNFMQIVNQADFKDAIAVANQNLLVDTSVEDILNEAYTSPANKKAIRQVVKVVDDIVKATSGKVPKQIAIEFTRDADDNAKISQSRANKLRKVYKEMSNELASETIRNELERVAKDQKLLKDKHYLYFMQLGRDAYTGELIDIDNLEQYDIDHVLPQSFIKDDSLENRVLVKKAVNNGKSDNVPVKLYGNRMATDLGMTIRHMWEKWKEQGLITKTKYNNLIIDPDKINKYESSGFIHRQLVETSQIIKLVSTILQSKYPDTEIIVVKARYNHYLRKRLNLYKSREVNDYHHAIDAYLSAICGNLLYQVYPYLRPFFVYGQYKKFSSEPEKEKIIYDKTRRYNFISQIFENKDNDIISRETKKKVFDKKDIIEKLKRAYNYKYMLVSRETETHDQEMFKMTVYPRLSRDTKKSRNLIPKKKDMPTEIYGGYTNNSDAYMIIARINKKKGPEYRVFGVPMRELVNLRKAEKNGHYKAYLKQVLEPEIMYSKNGKKNKTISSFEIVKAKVPYKQVILDGDKKFMLASSTYVQNAKQLTLSQYSMQAITDNCENDTEEEKALVEAYDEILTNIDKYLPLFDINKFREKLHAGREKFVDLPLAEKKETILQVLNGLHDNAVMPKIKSLGLSTPLGFMQFHTGVSLSENAKLIYQSPTGLFEKRLKISDL

SEQ ID NO: 277 - protein, 1369 aa, Lactobacillus iners
  source 1..1369: note = LactinV 11V1-d
MNNNYYLGLDLGTNSVGWAVTDDHYNIIKFHGKHMWGMRLFEEAETAKDRRLHRQARRRRQRLVERINLLEELFDKEISKVDQGFFARKKESDLHFEDKTTKSEYALFNDKSYTDRDYYKQYPTIFHLIMDLIENDKKRDIRLVYLACHYLIKHRGHFIFDGKNFTVDNSFENLLDKLITYLKDNDDITLSFPKDQLINIFKNSNLNSTEKSDQLKPFFGRTNLEKGIIKLLSGGKQDLSNMFRDETLKNSNYKNLKFSDNRFDDERDGYAADLGDRIDLLILLKQIYDASILESMMSQARVSIDGHKYISSAKVCAYEKHKSDLKRLKSLIKKYLPSEYNNIFRKITEKDNYVAYSKSNITNNKREKALKYVKYVDFTKYLTKKLKTIKTQDAEDDQEIFEIKGELEKQSFLPKQRTLDNSIIPYQLHLMELKKILDNQSKYYDFLLAKDDQEGITVKDKIISLLTFRLPYYIGPVNPAVHGKFAWVKRLANGKVTPWNYKEKIDIDASHEEFIKTKLSKCSFLIGCDVLPKNSLLYQKYMVLSELNTIKFNGVNISEKLKDDIYQNLFKNIQKVTKKRLQNYIKEHENIIGDVIVTGIDNAFKQGLVSYLKFKKIIGDKVDDDRYQKVLEKIIRDITLYDECAGKKIKKEYKDSDLFTEDELNKIVKLTFNDWGRLSAELLDQLEGEDTVSGETGKIIEFMQKHNYNLMQLMSKKFTFKSKIDEINKSYYQHDKFNYKSMIDSLYVSPATKRILWQSLKVVHEISKIMKHDPEKIFIEMARSKEDHPKRKLSRKADLKQVYKDSKKQIISIIGKDKYQDLSNELDNKDDRDLRWDNLYLYYTQLGRSMYSLKPIDISELMNKNLYDQDHIFPKSKKYDDSIENRVLVEKELNVKKSDIYPISDANIIPQKIKGQVESFWKMLYDHKLIGDKKYARLIRSKAFTDDELAGFIARQLVETRQATKETADLLKRLCPKSRIVYAKAQNASIFRQKFDIPKSRTINDLHHAQDAYLNIVVGNIFDTKFTQDPRNFIKNTKDSRNYNLEKIYDYNVERNNYVAWIAPDGETNGTIANVKCNLSTKDFRVTRPSFYKKGALFNQNLSRKGSNLAPIKEHSPKSNPLKYGGYSGKNNSFFVVVAGKDNKGKDIVKLIPVNTLIYNKMLHCDYKAKQELLTSYVANNFAINNFRIVKDDIKMYSLVKIDGAYYYLVGGTDERIEVKNAMQLLLSKDSIKAVKILEKESKDQFANIKNYKDIDIKLGRTFNEVVSKYTNSVFGKSMLISDKYRKDIFKSVEKSILEFNHLDTIGKADNLLKFVTLMRPSGSAHSLKMVGLIERIRKSNVISNFNEFKLINQSVTGLFENEEDLLKL

SEQ ID NO: 278 - protein, 1391 aa, Lactobacillus jensenii
  source 1..1391: note = 269-3
MKEIKDYIIGLDIGTNSCGYVVTDKQNNILKLKGKTAIGARLFKEGEAAADRRAFRTTRRRLARRRWRLSLLEEIFDEEMNKVDPSFFRRLKESDYSPKDRRKQFNSIVFESSEADKAFYEKYPTIYHLRNALMHDNQKHDLREIFLAVHHIVKYRGNFLREDSVKAFKAAKFTLQGEDGIGPVDKLNDLLKEIYIEAAPELATDNLSKIEDIIKDKKLYKQDKLKQIANLLPKAVDSKDKAKLNKDIAKQVANALMGYMFRLDTLFSFTDVDVKDYKLKFSDANIDESLDALTSLLTDAQIEFVLELQSIYNTIVLNEIVPDGMSLSESMVKKYDDHKKDLKLYKEYIDSLSDQKKAKQLEAAYALYVNYRKADLLAAKKLFEKKKIGDKKFVDVISNFEVFGKFVSDNLDDSELANKIKARLDLGEFLPKQRTNQNGVIPYQLHQVELTQILEKQGKYYPFLITPNPVESHRNNAPYEISELVSFRVPYYVGPLIDNQSIKDKQNKNKFAWMVRQKQGQITPWNFEEMVDTTESANQFIKRMTRKDTYLLAEDVLPKSSLIYQKFMILDELNRIKIDGKKLTSKLKHDIFEKLFKKQKSINLDNLKNYLLAEGNIPGLIEGLSDGINFNNSFSTYIDYRNIFGDEIDNPNKQADFEKMIEWSTVFEDRKIFKRKLKEITWLTPEQIKQVSSKRYSGWGRLSKKLLTQITDENGVNILQRLWNEPETLTEVLANPVIKRKISEANSLFVQINKVENILDDAYTSPQNKKAIRQVIRVVDDIIAAAHGKKPSQIAIEFARSSQNKAKVPDTRKKQLDKIYNKISSEILDSSIKNELKNLKSNKYLSKDKLFLYFKQMGRDAYTGDKLSLDQLQNYDIDHIFPRSFIKDDSLDNRVLTQKPINAKKSDYGIPALEFGNKYVPDLGITVKEMWKLWQENGLISKSKLINLCTNPKKIGSKRASGFINRQLVETSQVIKLVAIILQAEFPDTEIIEVKALQNTTLRESFHLYKNRSVNDYHHAIDAYLTTIVGNYLYQVYPKLRPYFVYGQFKKFNQEKNIDILKRLKNFNFLRQLIFNTDDNIYISGTKEIVFNKKDIIHKLETAYGYKYMNISRECYQETSSLFNQTLYAHNSSVKNSLIPKKKGLPTEIYGGYSGNKDSFFVLVKIVKKRTNLYRIVGIPTRELAKLNSSNNYNQALNKIVESKLCLKETESFKILIKRLLYGTLIVDNGQKFRIGSFKEKHNVQQLVLQLKSMKYIKFYIDGGQNYFTDVERKKLEKQDRDKCLLYVFDDIMNVVNKRFTLFDMSKYEKDGDSLREKFNCLDFNDKVSILSDLLKAFHANSDRTSITKLKITNLGRHQAGKNGITLTTNAQIIYQSPTGLFERRIKIKDL

SEQ ID NO: 279 - protein, 1395 aa, Lactobacillus jensenii
  source 1..1395: note = 27-2-CHN
MKEIKDYIIGLDIGTNSCGYVVTDKQNNILKLKGKTAIGARLFKEGQAAADRRSFRTTRRRLARRHWRLGLLEEIFDPEMEKIDPNFFRRLKESDYSPKDSRKQFNAIVFKSIKADKRFYKKYPTIYHLRNALMHDNQKHDLREIFMAVHHIVKYRGNFLREDSVNAFKAAKFSLRGEDGIGPVDKLNDLLKEIYSEYSPELATNNLSKIEDIIKDKNLYKQDKLKQVATLLIKEADSKDKAKLNKDIAKQVANSFMGYMFRLDTLFSLTDVDVKDYKLKFSDANIDESLDDLTSLLTDAQIEFVLELQSIYNTIVLNEIVPDGMSLSESMIKKYDDHKEDLKIFKEYIDSLSDQKKAKKLLSAYNLYVNYRKSDLVEAKNLFKNKKVGDKNFADVISNFEVFGKFVSDNLDDSELANKIKARLDLGEFLPKQRTNQNGVIPYQLHQVELTQILEKQGKYYPFLITPNPVESHRNNAPYEISELVSFRVPYYVGPLIDNQSIKDKQNKNKFAWMVRQKQGQITPWNLEEMVDTTESANQFIKRMTRKDTYLLAEDVLPKSSLVYQKFMILDELNRIKIDGKKLTSELKHDIFEKLFKKQKSINLDNLKNYLLVEGNIPGLIEGLSDGINFNNSFSTYIDYRNIFGDEIDNPNKQADFEKMIEWSTVFEDRKIFKRKLKEITWLTSEQIKQVSSKRYSGWGRLSKKLLTQITDENGVNILQRLWNEPETLTEVLANPVIKRKIVEANSSFTKAKDMKDILVEAYTSPQNKKAIRQVMRVVDDIIAAAHGKKPSQIAIEFAREDQDNPQMTKSRKAQLDQIYAKISDEFLDDAVKNELKNMKDNKPLAKDKVFLYFKQMGRDAYSGEKLSLDNLQDYDIDHIYPQSFIKDDSFDNRVLVQRAYNNGKSDNVPVLLFGNKIAAGLGITIRQMWKKWLELGLISKRKFNNLITDPEKISRNMASGFVNRQLVETSQVIKLVANILQAKLPDTEIIEVKASYNSILRKEFNLYKSREVNDYHHAIDAYLTTIVGNYLYQVYPKLRPYFVYGQFKKFGKAENQEDDPVKKIKKFNFIYQLIWGKDDAICISHTNQQVFSKKDIIDKLTTAYNFKYMNISHAVYTRNNNMFKQTLFPIIERTTAKTKSLIPKKLDRPTDIYGGYSNNNDAYLALVKVDKKRGSEYRVVGIPMRAAAMLKASKNYDEDLRKVIEPMVMFDKNGKAKRGIEGFRVLVGKMPFKQAVLDGNKKFMLTGTVDTPNLKQLVLSQQNMKYILDYIEDVDCRKHKFGDKVQNPDKCLLEVFDEIIEIVDKYFELFDSRDFREKLRNSRNKFIKLEASKKADTILAILKGLQAKSTRATIKELNISDFGRIITSSISPEAQLIYQSPTGLFERRVKVKDL

SEQ ID NO: 280 - protein, 1375 aa, Lactobacillus johnsonii
MTKIKDDYIVGLDIGTDSCGWVAMNSNNDILKLQGKTAIGSRLFEGGKSAAERRLFRTTHRRIKRRRWRLKLLEEFFDPYMAEVDPYFFARLKESGLSPLDKRKTVSSIVFPTSAEDKKFYDDYPTIYHLRYKLMTEDEKFDLREVYLAIHHIIKYRGNFLYNTSVKDFKASKIDVKSSIEKLNELYENLGLDLNVEFNISNTAEIEKVLKDKQIFKRDKVKKIAELFAIKTDNKEQSKRIKDISKQVANAVLGYKTRFDTIALKEISKDELSDWNFKLSDIDADSKFEALMGNLDENEQAILLTIKELFNEVTLNGIVEDGNTLSESMINKYNDHRDDLKLLKEVIENHIDRKKAKELALAYDLYVNNRHGQLLQAKKKLGKIKPRSKEDFYKVVNKNLDDSRASKEIKKKIELDSFMPKQRTNANGVIPYQLQQLELDKIIENQSKYYPFLKEINPVSSHLKEAPYKLDELIRFRVPYYVGPLISPNESTKDIQTKKNQNFAWMIRKEEGRITPWNFDQKVDRIESANKFIKRMTTKDTYLFGEDVLPANSLLYQKFTVLNELNNIRINGKRISVDLKQEIYENLFKKHTTVTVKKLENYLKENHNLVKVEIKGLADEKKFNSGLTTYNRFKNLNIFDNQIDDLKYRNDFEKIIEWSTIFEDKSIYKEKLRSIDWLNEKQINALSNIRLQGWGRLSKKLLAQLHDHNGQTIIEQLWDSQNNFMQIVTQADFKDAIAKANQNLLVATSVEDILNNAYTSPANKKAIRQVIKVVDDIVKAASGKVPKQIAIEFTRDADENPKRSQTRGSKLQKVYKDLSTELASKTIAEELNEAIKDKKLVQDKYYLYFMQLGRDAYTGEPINIDEIQKYDIDHILPQSFIKDDALDNRVLVSRAVNNGKSDNVPVKLFGNEMAANLGMTIRKMWEEWKNIGLISKTKYNNLLTDPDHINKYKSAGFIRRQLVETSQIIKLVSTILQSRYPNTEIITVKAKYNHYLREKFDLYKSREVNDYHHAIDAYLSAICGNLLYQNYPNLRPFFVYGQYKKFSSDPDKEKAIFNKTRKFSFISQLLKNKSENSKEIAKKLKRAYQFKYMLVSRETETRDQEMFKMTVYPRFSHDTVKAPRNLIPKKMGMSPDIYGGYTNNSDAYMVIVRIDKKKGTEYKILGIPTRELVNLKKAEKEDHYKSYLKEILTPRILYNKNGKRDKKITSFEIVKSKIPYKQVIQDGDKKFMLGSSTYVYNAKQLTLSTESMKAITNNFDKDSDENDALIKAYDEILDKVDKYLPLFDINKFREKLHSGREKFIKLSLEDKKDTILKVLEGLHDNAVMTKIPTIGLSTPLGFMQFPNGVILSENAKLIYQSPTGLFKKSVKISDL

SEQ ID NO: 281 - protein, 1382 aa, Lactobacillus mucosae
  source 1..1382: note = LM1
MDIGTNSIGWTAIDDHFSLLRVKGKNAIGVRTFKEGETAADRRGFRTARRRLSRRRWRLQFLDEFFAPYLAEVDPNFLARLKQSDISAKDPAKNQEYMGKLLFPDQEAASDGNGYPTLIQMRKAMPAEKAADFPVFNIYQLRYALMNEKRKFDLREIYLAVHHIVKYRGNFLNNTSVDKFKADQIDFNKSFETLNDLFRQVQPIAPFQIDLTKVDELGKLLLDTKQKKLDRQKAVAKLLPLIEDGTDKEIVKAHQQTAREISKLILGYKAKVGLILQNNLDQTLDMSTENSDDQLMQIAEELDDYQMELINQLSLLYSQIMLNEIVPNGETVSASMLNRYYKHRCQLKELKDYGAAQDKKTREQLDHLYAEYIGQIPKDSKFDFTKDLKKLMDKSDLGQKIKDEIEAGDYLPKQRTSANGVIPHQMHQQELDQIIENQKEYYPWLAEPNPVEKNIKNAKYKLDQLVSFRVPYYVGPMITLADQQKTSKASFAWAVRKKAGKITPWNFYDMIDREKSANNFIKRMTNKDTYLLSEDVLPASSLLYQKFTVLNELNNIRVNGRKLQPALKQAIYTDLFQKRKTVNLKTLTNFLAIHEPTLTKPKIEGLSNGRSFNSSLGTYIDMSKILGDSLDDLNYRDDIEKIIEWSTVFEDSEIYGVKLQEIQWLTNEQREKLVRKRYQGWGRLSKKLLTGITDENGQRIIDLMWDTSKNFMQIVHQPVFEEQIAELNQQLLQDADKAPLEVVDDILADAYTSPQNKKAIRQVVKVVADVVKAVGNAPASISIEFARNEDRNKELKNSRRHSIEKLYHETAEKLVKQTNLLEELGNVKDLNDRYYLYFTQAGRDMYDGTPINIDEISTHYEIDHILPQSFLKDNSLDNRVLVKKSENAAKSDRVPAKLYGAKMRAFWKQLKESQLISNRKYLNLTTDPEQVDKYQMQGFVHRQLVETRQIIKLAANIFGSLYPDSAVIETRAELTKQLREKFSLYKVRDVNDYHHAVDAYLTAFAGHYLYQRYPKLRPMFVYGDYAKIYADDLKRLRSVNLFHDLEKDQYNSGTAVNPETKEKIVDVDWLSDYVSKIQHFKYMLISKAVYTQHGQLYGATILPVAQVDKISAPIGIKDDKPVDIYGAYTNEVAAYMAIVRVNGKKPKYKVVSVPVRMLQRLKMAEQKGHDQYMQTLHDVLLRNFTSLKKNRKTGLKEAVVKDFDVLVPCVRYNQLVIDGDTKFTLGSATYQHNAKQLVLCNHSLETLANNFEYVRKHPDEADERMIMLYDDILDQVNHYFTLYDKNKFREKLNAGRDKYLKLPTFSQFENNKKTAIGKSEAIINILRGLHANAAITNLKCLGVSTPFGQLQSPSGIELSENAKLVYQSPTGLFSREVLLKDL

SEQ ID NO: 282 - protein, 1362 aa, Lactobacillus paracasei
  source 1..1362: note = subsp. paracasei 8700:2
MTKLGKPYGIGVDIGSNSIGFAAVDENSHLIRLKGKTVIGARLFEEGKAAAKRRAGRTTRRRLSRNRWRLSFLRDFFESHITPTDPNFFMRQKYSEISPKDKARYKYEKRLFNDRTDAEFYQQYSTMYHLRNRLMTDPSRADVREIYFAIHHILKSRGHFLTPGDAKDFNTNDVALDEIFPALQDAYAQVYPDLGITFDEDKANEFKTILLNEIATSIDTQRALVKLLLAEEDDKDILKQQKQVLTEFAKAVVGLKTKLNLALGTEVDSSEATAWNFSLGQLDDKWAGIESAMTDEGTEILDQIRDLYRARLLNGIVPTGKTLSQAKVDDYTQHHEDLQLFKAYLKQLEDDGTAKAIRQLYDRYIDGDDAAPFLRENFVKALTKDVTAHPNTKSPELLERLAQPDFMLKQRNKANGAIPVQMQQRELDQIIKNQAVYYDWLAAPNPVEKHRKSMPYQLDELLNFRIPYYVGPLVTAKEQKAAQGGVFAWMVRKDPEGNITPYNFDEKVDREASANTFIQRMKTTDTYLIGEDVLPKQSLLYQRYEVLNELNNVRVNNEKLSIEQKQQVIRELFERHNSVTIKQFAENLRAHGDYAHIPEIRGLADEKRFLSSLSTYRQLKSLLPEAIDDPAKQADIENIIAWSTVFEDAAIFKTKLKEISWLGSEAITKLSNIRYRGWGQFSRKFLNGLTLGNGHTIIQELLLSTNNLMQILTDETLQKKMTELNADKLKTANINDAIDNAYTSPSNKKALRQVLRVVDDIKRAADGQDPSWLYVETADGGGTPGKRTRARQHQLQEIYANAAHELIDTAVRGELEDKISDKADFNDRLVLYFMQGGRDIYTGAPLNIDQLSSYDIDHILPQSLIKDNSLDNRVLVHAIINREKNATFASTIYAQKMNATWRQWHEAGLISGRKLRNLQMRPDQIDKYASGFVARQLVETRQIIKLTEQIVAAQYPDTKIIAVKAGLSHQLREELEFPKNRDVNHYHHAFDAFLAARIGTYLLKRFPNLQAFFTYGKFTKADVKKLRGFNFIRDITHAEDKIVAKDTGEVVWDKQRDVDELDRIYNFKRMLITHEVRFETADLFKQTVYGARDSKEAGGSKQLIPKKKGYPVDIYGGYFRENTAYLAVVKVTKKTETIFKVVKIATSQVAALNKARSRSTAEELSVLTELLKPKFSKVGKNGKITDTPFEVVLPRVPREQLFYNAKYGFFMVNSDTMFHNFQEIWVSRSDQKILQQIRKAKIDYPNVDQDLDNLFHNLADQIVKYFDLYSIAGFKEKISQSQNTFNDLAVDDTDQSVGKITVINELLKGAQANGMTGSLKVLKISTPFGFTQDKSGVLTKDSSIIYQSPTGLFERSVRLTDL

SEQ ID NO: 283 - protein, 1382 aa, Lactobacillus pentosus
  source 1..1382: note = IG1
MKKIVNYNLGLDIGTSSIGYAAIDDQGRPVRHQNKTVMGVRLFKEGKTAESTRIFRGTRRRLSHRHWRLGYLDRIFDNEIAKVDENFLPRLKASKRARSDEKRSFRGSLLFPETGDDAYYQKYPTIYHLRYALITQKKQFDIRLIYLALHHMIKYRGNFLDTTPVSAFNIHDIDLTDQFASLNDCYQLLDMDFEFQFDLNNIEQVQKLLLDETLSKTKRQAAVSKVLVMSTGNKAFDDQQNGIASEFIKALLGGPFDLSKILNLSVADVKSWKLHMTDKDVDDTLNSLVEELDENHKQIVNLLQMIYSQVMMLGLLNGQQSISASMIERYDDHAKHWAALKKLLPALGEQEQSTIIHAYTAYTGHSRTKQLSRAEFYTKVNSILKKHENIAEATGLIELIDRNEFMPKQRDAVNGVIPHQLHQRELQLIIQNQQKYYPFLAAKAYPDADETMIEQLLSFRVPYYAGPLVDRDFINESSDQEQAMQNTKFSWLKRREAGEITPWNFEQKVDVQETANRFIKRLTTKDTYLMTEDVLPKESLIYQRFEVLNELNAIRINDRRLTAENKQLAFQQLFMAGNTKNVSIKKFRNFVFDSLKFPEKVKITGFAGQHNFLAKLSTYHDFKKIFGERVDHTDLQPDFERIVEWCTIFEDRHIYREKLKEIQWLSQSEIDQLVLIRNHGWGRLSKRLLTGIRDSDGRTVMDQLWFGTDNFMRIISQSDFAAAIANENRTQLNQHGLEDVLDSAFMSPQNKKAIRQVLKVVDDIEQTLGCPPKKVMIEFTRSPDKKKQRTVTRLEKVQQAYKAVADQLAGQSIVSELDQYANTHSKLSDTYYLYFMQLGRDLYSGKPIDIDSPMLDDDHILPRAFMKDNSLDNRALTEKPINNTKAAKFPSKVFGQQKEVTDFWKLLRRCGLMSNIKEKHLYLDPDNVDKWTRRGFIHRQLVETSQVIKIVANILNDRYQQSQTEVLEVPARLGTELRECFGWYKVREVNDYHHVFDAYLAAFIGNYLYRRYPKLQPYFVYGNFAELNKAQLKNIKSFNFLYNITDNKRVVKDIETGQTLWDDQIRQQIQHIYEYKYMLTSHEAFTQHKELYGQTIYPRREFKPGTLKAIKQDQPQELYGGYKNLTAAYMCIVKIQARKRRAAEYRVVRVATESLSALQQAKRLGVQAYERCLRQELVRNNEILRTNADPNSAPREFEVLLDRVLCHQMIISDGQKYLLGSHAYKINCMQLVLSNNSMKILSTSIVKLKQMTNEPLVQVYREILDVVNKYFTLYDVNSFRENLNQFFDKFRTLPITNEYESSKSGKKLIHRGQLETLTLILRGLHANSDKVQYGDQSTLLGGFQTKDGIKLSKDSVIQYTSPAGLNVRTVKLRDLEQKEAQK

SEQ ID NO: 284 - protein, 1361 aa, Lactobacillus pentosus
  source 1..1361: note = KCA1
MNEPYGVGLDIGTNSVGWTVVDMNGRVRKVKGKTALGARLFKEGATAEDRRGFRTTRRRLKRVKWRLRLLREFFDQPISKIDPNFFARRKYSDISPRDPNYNGLAKTLFNDRTDKEFYDDYATIYHLRDKLMTSNRKFDIREIYLAIHHIVKYRGNFLRTGPASQYGSASLHLATSFQKLNDLFAQSEETLNLKLVTDEALLQQIQQILVRTDLSRSEQQRQIWPLMAVLTGASAAEKKRQKNVVVELSKALVGLKAKMNVVTLTEVDAAVVKDWTFTMEESQDKLPEIEEQLSEVGQQIMDEVIQLYASVNLAQLIPAGKRFSQHMVEKYKHHEKNLELLKAYIHSQSDSKRGREIRATYDRYIDGVDSKPVTQEMFYKDLMKYVEADATSNHLAAEIKDEIDSEQFMPKLRTKQNGSIPYQVQQYELDQIISHQKKYYPWLGEENPVAERRGKFPYKLDELVGFRVPYYVGPLITKEDQQATSGAGFAWMVRKADGPITPWNFDQKVDRIASATAFIQRMQTTDTYLIGEDVLPARSLIYQRFMVLNELNNMRVEDRKLAPQQKQRLYNQVFKQHQHVSVKNIQQNLMDAGEYRKTPQITGLADPKGFNSSLSTYHDFKKILLEAIADEHKRADIEKIILWSTTFEDSAIFKQKLEEVAWLTDAQRKQLSGLRYRGWGQLSHKLLTAFKDDKGRSIMDGLWETSDNFMQLRKQPAIETQIKEANQANLTDADIQDTINELYTSPQNKKAIREVMLVLDDIKNAMHGQTPSWIFVEAARGGGVAGRRTQSRSSQIVEAYKGTAKEIVSEKVQHELNEKIKAKADFNTRLVLYFLQNGRDLYTNEAINIDRLSEYDIDHILPQSLVKDDSLDNRVLTSARINREKNDTFASEKFGRKMGAQWRELHRNGLMTQRKLKHLLMRPDEISKHATDFINRQLVETRQVIKLVEELISSEYPAASIVAVKANLTHQFRQTFNFPKLREVNDYHHAFDASLTAFIGMYLLKQYPKLERFFVYGKFAKQPINLTRFNIIRKLAVAEKPIANIETGEILWDKTADIKYFEKLYNYKRLLVTHEVRENYGAMFKQTLFKASYNKSKTLVPKKNHMETSVYGGYSNQETAYLAIVRIPFKSGFKFIVVGIPTRMVAKIKHYQSLGATLNQATHKVIEPKFTKISRKTKQTVISDYEVVLPKVYLDQVVRDQVKGQMYRFSLGSDKEYHNVQELYLPLSIQQAFVGHYDESDDQRSNDLVKVYDAALKQLQRYFPLHLSRNFDQVASQAHQSFEGLKNNVQTSDKQLGKKEVLNSLFVGLHANATRSNLSVLGMSKDFGRIKSNGITLTDQAEIIYQSPTGLFERKVALKDL

SEQ ID NO: 285 - protein, 1358 aa, Lactobacillus pentosus
  source 1..1358: note = MP-10
MNEPYGVGLDIGTNSVGWTVVDMNGRVRKVKGKTALGARLFKEGATAEDRRGFRTTRRRLKRVKWRLRLLREFFDQPISKIDPNFFARRKYSDISPRDPNYNGLAKTLFNDRTDQEFYHDYPTIYHLRDKLMTSDRKFDIREIYLAIHHIVKYRGNFLRTGPASQYGSASLHLATSFQKLNDLFAQSEESLNFKLVTDEAQLQQIQQILVRTDLSRSEQQRQIWPLMVVLMGATAAEKKRQKDFAKELANALVGLKAKLNVVTLTNVDTTVVKDWTFTLEESQDKLPEIEEQLSEVGQQIMDEVIQLYASVNLAQLIPAGKRFSQHMVEKYNHHEKNLELLKAYIHSQSDSKRGREIRATYDRYIDGVKSKPVTQEMFYKDLMKYVEADATSNHLAAEIKDEIDSEQFMPKLRTKQNGSIPYQVQQYELDQIISHQKKYYPWLGEENPVAERRGKFPYKLDELVGFRVPYYVGPLITKEDQQATSGAGFAWMVRKADGPITPWNFDQKVDRIASATAFIQRMQTTDTYLIGEDVLPARSLIYQRFMVLNELNNMRVEDQKLAPRQKQRLYNQVFKQHQHVSVKNIQQNLMDAGEYRETPKITGLADPKGFNSSLSTYHDFKKILPEAIADEHKRADIEKIILWSTTFEDSAIFKQKLEEVAWLTDAQRKQLSGLRYRGWGQLSHKLLTAFKDDNGRSVMDGLWETSDNFMQLRKQPAIETQIKEANQANLTDADIQDTINELYTSPQNKKAIREVMLVLDDIKNAMHGQTPSWIFIEAARGGGVAGRRTQSRSKQIVEAYKSTAKEIVSEKVQHELNEKIKAKADFNTRLVLYFLQNGRDLYTNEAINIDRLSEYDIDHILPQSLVKDDSLDNRVLTSARINREKNDTFASEKFGRKMGAQWRELHRNGLMTQRKLKHLLMRPDEISKHATDFINRQLVETRQVIKLVEELISSEYPSASIVAVKANLTHQFRQTFNFPKLREVNDYHHAFDASLTAFIGMYLLKQYPKLERFFVYGKFAKQPINLTRFNVIRKLAVAEEPIANIETGEILWDKTADIKCFEKLYNYKRLLVTHEVRENYGAMFDQTIFKATDSRKRLIQKKKGFATETYGGYTGRTLAYLAIVKVVTNKDTQYQVVGIPTTMVTQIQQLEASGLTSKQAVTKAIGAMINENNKKLQSYEVLLPKVRFEQVVRDEVKGHIHRFALGTDTYYHNIQELYLPLTIQRAFLGKRNDTDAQTEQNLLTVFETTLAQVNRYFPLYEMNKFKQILNSAQEKFAALPTKNKTVKNKLVTGKDGVLNNLFIGLHANASLGDLKILGMKIGFGKLQVPGGLKLTDQAEIIYQSPTGLFERKVALKDL

SEQ ID NO: 286 - protein, 1358 aa, Lactobacillus plantarum
MKEPYGVGLDIGTNSVGWTVVDASGHVRKIKGQTGIGVRLFKEGAAAADRRGFRTTRRRLKRVKWRLRLLREFFDQPISKVDINFFARRKYSDVSPRDPNYNGLEKTLFNDRSDQDFYHDYPTIYHLREALMTQHRKFDVREIYLAIHHIVKYRGNFLRNDAATAYRSGTLDLQQHFETLNHLFSQADLELNLNLTTDVALLDSIKQTLVRTDISRSDRQKLIMPLLAVLTGATTAEKKRQKAVVTEFAKALVGNKTKIDVLTLTDIDATEAKDWAFSLEENQDKLPGIEDRFSEVGQQIIDEVIRLYASVNLAQLIPEGKRFSQSMVEKYKRHGEDLKLLKAYIRSQSDAKRGRAIRATYDQYIDGVKSKQVTQEAFQKALGKFVDADVDLNSWAAQIKQAIDSEQFMPKLRTKQNGAIPYQVQQNELDQIISNQKEYYPWLGEENPVIKRRGKFPYKLDELFGFRVPYYVGPLITKEMQAATANAGFAWMVRKADGPITPWNFDDKVDRVASATAFIQRMQTTDTYLIGEEVLPARSLIYQRFMVLNELNNIRVDDGQLTPRQKQRLYNQVFKKHKRVTAKNIQDNLVAAREFPTAPRITGLADPKVFNSSLSTYHDLKQVLPEAMSDVRKQADIEKIILWSTIFEDSTIFKQKLTEISWLTAAQLKQLGQLRYRGWGQLLRKLLTGLKDDNNRSIMDGLWETNANFMQLRSQPAIENQIKSANQANLTTADLQDTINELYTSPQNKKAIREVMVVLADIKDAMHGQTPNWIFVEAARGGGVAGRRTQSRSKQIVAAYQGTAQAIVRDQVQRELKEKIKNKANFNTRLVLYFLQNGRDLYTGDAINIDRLSEYDIDHILPQSLVKDDSLDNRVLTNARINREKNDTFASEKFGKKMGAKWKEMHRMGLMTKRKLDHLLMRPDEISKYATGFINRQLVETRQVIKLVEELINAEYPSTAIVSVKANLTHQFRQTFDFPKIREVNDYHHAFDAALTAFIGTYLLKRYPKLERFFVYGKFAKQPVNLTRFNVIRKLAKTDTPITDIDTGEVLWDKLTDIKYFETLYDYKRLLVTREVSENYGAMFDQTLLKASDNGKRLIRKKQSFDTAIYGGYTGKTLAYMAIVKVSTKKDVQYQVVGVPTTMVTQIEQLEQQGMTNKQAVTKVIEPLIAANNKKMLTYEVLLPKVRFEQVVRDRIKGQTHRFALGTDTYYHNIQELYLPLTLQRAFLGKQNESEVQLNQNLLTVFDATLAQVNRYFPLYEMNKFKKILNSARDQIELLEAKNQFVKNKLVLGKQGILTNMFIGLHANASYGDLKVLGVKIDFGKLQVPGGIKLTGDAEIIYQSPTGLFERKIALKDL

SEQ ID NO: 287 - protein, 1363 aa, Lactobacillus rhamnosus
MTKLNQPYGIGLDIGSNSIGFAVVDANSHLLRLKGETAIGARLFREGQSAADRRGSRTTRRRLSRTRWRLSFLRDFFAPHITKIDPDFFLRQKYSEISPKDKDRFKYEKRLFNDRTDAEFYEDYPSMYHLRLHLMTHTHKADPREIFLAIHHILKSRGHFLTPGAAKDFNTDKVDLEDIFPALTEAYAQVYPDLELTFDLAKADDFKAKLLDEQATPSDTQKALVNLLLSSDGEKEIVKKRKQVLTEFAKAITGLKTKFNLALGTEVDEADASNWQFSMGQLDDKWSNIETSMTDQGTEIFEQIQELYRARLLNGIVPAGMSLSQAKVADYGQHKEDLELFKTYLKKLNDHELAKTIRGLYDRYINGDDAKPFLREDFVKALTKEVTAHPNEVSEQLLNRMGQANFMLKQRTKANGAIPIQLQQRELDQIIANQSKYYDWLAAPNPVEAHRWKMPYQLDELLNFHIPYYVGPLITPKQQAESGENVFAWMVRKDPSGNITPYNFDEKVDREASANTFIQRMKTTDTYLIGEDVLPKQSLLYQKYEVLNELNNVRINNECLGTDQKQRLIREVFERHSSVTIKQVADNLVAHGDFARRPEIRGLADEKRFLSSLSTYHQLKEILHEAIDDPTKLLDIENIITWSTVFEDHTIFETKLAEIEWLDPKKINELSGIRYRGWGQFSRKLLDGLKLGNGHTVIQELMLSNHNLMQILADETLKETMTELNQDKLKTDDIEDVINDAYTSPSNKKALRQVLRVVEDIKHAANGQDPSWLFIETADGTGTAGKRTQSRQKQIQTVYANAAQELIDSAVRGELEDKIADKASFTDRLVLYFMQGGRDIYTGAPLNIDQLSHYDIDHILPQSLIKDDSLDNRVLVNATINREKNNVFASTLFAGKMKATWRKWHEAGLISGRKLRNLMLRPDEIDKFAKGFVARQLVETRQIIKLTEQIAAAQYPNTKIIAVKAGLSHQLREELDFPKNRDVNHYHHAFDAFLAARIGTYLLKRYPKLAPFFTYGEFAKVDVKKFREFNFIGALTHAKKNIIAKDTGEIVWDKERDIRELDRIYNFKRMLITHEVYFETADLFKQTIYAAKDSKERGGSKQLIPKKQGYPTQVYGGYTQESGSYNALVRVAEADTTAYQVIKISAQNASKIASANLKSREKGKQLLNEIVVKQLAKRRKNWKPSANSFKIVIPRFGMGTLFQNAKYGLFMVNSDTYYRNYQELWLSRENQKLLKKLFSIKYEKTQMNHDALQVYKAIIDQVEKFFKLYDINQFRAKLSDAIERFEKLPINTDGNKIGKTETLRQILIGLQANGTRSNVKNLGIKTDLGLLQVGSGIKLDKDTQIVYQSPSGLFKRRIPLADL

SEQ ID NO: 288 - protein, 1361 aa, Lactobacillus rhamnosus
  source 1..1361: note = HN001
MTKLNQPYGIGLDIGSNSIGFAVVDANSHLLRLKGETAIGARLFREGQSAAERRESRTTRRRLSRTRWRLSFLRDFFAPHITKIDPDFFLRQKYSEISPKDKDRFKYEKRLFNDRTDAEFYEDYPSMYHLRLHLMTHTHKADPREIFLAIHHILKSRGHFLTPGAAKDFNTDKVDLEDIFPALTEAYAQVYPDLELTFDLAKADDFKAKLLDEQATPSDTQKALVNLLLSSDGEKEIVKKRKQVLTEFAKAITGLKTKFNLALGTEVDEADASNWQFSMGQLDDKWSNIETSMTDQGTEIFEQIQEHYRARLLNGIVPAGMSLSQAKVADYGQHKEDLELFKTYLKKLNDHELAKTIRGLYDRYINGDDAKPFLREDFVKALTKEVTAHPNEVSEQLLNRMGQANFMLKQRTKANGAIPVQLQQRELDQIIANQSKYYDWLAKPNPVEKHRASKPYQLDELLTFRIPYYVGPLITPKEQAESRENVFAWMIRKDPSGNITPYNFDEKVDCPASANMFIQRMKNTDTYLIGEDVLPKRSLLYQKYEVLNELNNVSIDGRRLGADQKQRLIREVFERHSSVTIKQVAENLVAHGDFAKRPEIRGLADEKRFLSSLSTYHQLKKILHEAIDDPTKEHDIENIITWSTVFEDAAIFKTELAKISWLDSDTIKALSNIRYRGWGQFSRKLLDGLKLGNGHTVIQELMLSNHNLMQILTDETLKTTMAELNQDKLKADDIEDVINDAYTSPSNKKALRQVLRVVEDIKHAANGQDPSWLYIETADGPGTAGKRTQSRQKQIQTVYANAAQELIDSAVRGELEDKIADKASFTDRLVLYFMQGGRDIYTGAPLNIDQLSHYDIDHILPQSLIKDDSLDNRVLVNATINREKNNVFASTLFASKMAATWRKWHEAGLISGRKLRNLMLRPDEIDKFAHGFVARQLVETRQIIKLTEQIAAAQYPNTKIIAVKAGLSHQLREELDFPKNRDVNHYHHAFDAFLAARIGTYLLKRYPKLAPFFTYGEFAKVDVKKFREFNFIGALTHAKKNIVAKDTGEIVWDKERDIQELDRIYNFKRMLITHEVYFETADLFKQTIYAAKDSKERGGSKQLIPKKQGYPTQVYGGYTRENTAYLAVVKTVEKKADVYRVVRIATSQVAALKEARAQSTVKERELLKKFLTTKFTKIGKNGKKAITPFDIVIPRVPREQLFHNKRYGFFMVNSDTLMHNYQELWMSRSDQQILSKLVKSAKTVENGQVGRLFENIVEQINKYFPLYDINQFRKKLDQSKDIFSKLPLEGNGTTSGKRETIQNILTGAGTGAKNGDLKNLGIKTPFGFLQVPSGIVLDDDTTLIYQSPTGMLNRIVRLSEL

SEQ ID NO: 289 - protein, 1361 aa, Lactobacillus rhamnosus
  source 1..1361: note = R0011
MTKLNQPYGIGLDIGSNSIGFAVVDANSHLLRLKGETAIGARLFREGQSAAERRESRTTRRRLSRTRWRLSFLRDFFAPHITKIDPDFFLRQKYSEISPKDKDRFKYEKRLFNDRTDAEFYEDYPSMYHLRLHLMTHTHKADPREIFLAIHHILKSRGHFLTPGAAKDFNTDKVDLEDIFPALTEAYAQVYPDLELTFDLAKADDFKAKLLDEQATPSDTQKALVNLLLSSDGEKEIVKKRKQVLTEFAKAITGLKTKFNLALGTEVDEADASNWQFSMGQLDDKWSNIETSMTDQGTEIFEQIQELYRARLLNGIVPAGMSLSQAKVADYGQHKEDLELFKTYLKKLNDHELAKTIRGLYDRYINGDDAKPFLREDFVKALTKEVTAHPNEVSEQLLNRMGQANFMLKQRTKANGAIPVQLQQRELDQIIANQSKYYDWLAKPNPVEKHRASKPYQLDELLTFRIPYYVGPLITPKEQAESRENVFAWMIRKDPSGNITPYNFDEKVDCPASANMFIQRMKNTDTYLIGEDVLPKRSLLYQKYEVLNELNNVSIDGRRLGADQKQRLIREVFERHSSVTIKQVAENLVAHGDFAKRPEIRGLADEKRFLSSLSTYHQLKKILHEAIDDPTKEHDIENIITWSTVFEDAAIFKTELAKISWLDSDTIKALSNIRYRGWGQFSRKLLDGLKLGNGHTVIQELMLSNHNLMQILTDETLKTTMAELNQDKLKADDIEDVINDAYTSPSNKKALRQVLRVVEDIKHAANGQDPSWLYIETADGPGTAGKRTQSRQKQIQTVYANAAQELIDSAVRGELEDKIADKASFTDRLVLYFMQGGRDIYTGAPLNIDQLSHYDIDHILPQSLIKDDSLDNRVLVNATINREKNNVFASTLFASKMAATWRKWHEAGLISGRKLRNLMLRPDEIDKFAHGFVARQLVETRQIIKLTEQIAAAQYPNTKIIAVKAGLSHQLREELDFPKNRDVNHYHHAFDAFLAARIGTYLLKRYPKLAPFFTYGEFAKVDVKKFREFNFIGALTHAKKNIVAKDTGEIVWDKERDIQELDRIYNFKRMLITHEVYFETADLFKQTIYAAKDSKERGGSKQLIPKKQGYPTQVYGGYTRENTAYLAVVKTVEKKADVYRVVRIATSQVAALKEARAQSTVKERELLKKFLTTKFTKIGKNGKKAITPFDIVIPRVPREQLFHNKRYGFFMVNSDTLMHNYQELWMSRSDQQILSKLVKSAKTVENGQVGRLFENIVEQINKYFPLYDINQFRKKLDQSKDIFSKLPLEGNGTTSGKRETIQNILTGAGTGAKNGDLKNLGIKTPFGFLQVPSGIVLDDDTTLIYQSPTGMLNRIVRLSEL

SEQ ID NO: 290 - protein, 1375 aa, Lactobacillus ruminis
  source 1..1375: note = ATCC 25644
MRKNQEPYNIGLDIGTSSIGWSIMNDNFDLMRVKGKKGIGVRLYNEGQSAAERRMHRTARRRYGRRKWRLRLLEDFFDEHMAEVDDTFFARLKDSNISPKDDKKYRKSLLFPKSKGVTYQDDGEFYKKYPTMYHLRYALMTEHRKFDLREIYLAFHHMVKYRGNFLYDTSVDSFEAKNLDIKGKFDEINDLLSSYTDFYVDNSNAALVESILLEKNTTRKDKSKKIAKLLHVEDKEKGKNKKAKDLATQISNAVLGLKCNFHLIFELQQKYSFDLCSEKTEENIAKLSEVLDENQKMLLMILKEVQDQVMLNAFVPSGMSLSEAMMQKYDDYGEQLKIYHELEHSVSDDSAAKLRGAYRDYNDNIIKRIDGDNKKDTFYKRVKNILTKISKEYVDQDVLESCGKLKKLIDENKLFIRQRTAANGVLPHQLHQIEMRKIIDNQKEYYPWLAEPNPNEKRRVYSKYKVEELIAFRIPYYVGPLVDPNNADKNKEARFSWMVRKKDGEITPWNFYDKVDWAESANNFIERMKSKDTYLLGEDVVPKESMLYQKYEVLNELNNLRINDSGLSDSFEDVKLKQAIYNDLFKKQKIVKITDLQNYLVQNHKYLVKPKISGLADENRFLSSLSTYSDLKTIFGDKVDDRTYFNDFEKMVEYSTVFEDGHDYNQKLDEYTWLTKEEKYKIGKKRYRGWGKLSKKLLTGLRDKNNHTIMDNLWETNRNFMQIQTADEFSKQIAEENERHLKGSVSDAINDMYTSPANKKAIRQVLRVVDDIQKAMGYAPSSISLEFAREDGPSVRTVSRANRMKSIYEKYASEVSEEVMKDLDGVIKDKKGLNDRLYLYFEQQGKDMYSGHPLDFDKVISGQEYDIDHILPQAVIKDDSLDNRVLTTKALNNDVKSKGVPCRMFNGMHSFWKNLYDKGFISRRKFNNLTTNPENIDKYKMKGFVNRQLVETRQIIKLVANVLNDKYQNDDVDIIEVRAELTHDVRKHFKFYKNRNVNDYHHAFDAYLTSFIGHYLFKKYPNLRPLFDYNDFMKVSDNVFKQLRGNNFLGEFLNKTGDIISTDGNFVLNKEEMINKLNKAYAFKKILVTKEVGQRTGAMFNETRYPAPNSRKAALKYRRMPKPDSLISVKDYKNTDIYGGYSGKNDAYMVIVDMGKQYMVVGVPVRYTEKLDKLRIKHSELYRDELRKVLSRDKTLLDSKGNVKRFDIVLDRVLYGQLIEDGNELFTLGSSKYKRNFRQLFLDKQCIEILDSSATPQPTDEELIWVYDQILDKVDKYFELYDINRQRETLRKGRAAFCSLPNISMKKDDVTKKKILNEILVALHANESESNCEKIGKKVFGRLQVPGGIKLSKEAKLIYQSPTGLFERVVYLKDL

SEQ ID NO: 291 - protein, 1339 aa, Lactobacillus salivarius
  source 1..1339: note = SMXD51
MERYHIGLDIGTSSIGWAVIGDDFKIKKKKGKNLIGTRLFNEGATAAERRGFRTQRRRLNRRKWRLKLLEEIFDPYMAEVDEYFFARLKSSNLSPKDSNKKYLGSLLFPDKSDSNFYDKYPTIYHLRRDLMEKDEKFDLREIYLAIHHIVKYRGNFLEKVPAKNYKNSGASIGFLLEEVNSLYKDIIGDESIAILNSEKFEDVEKIILDEETRNLDKQKSVGKLLVEDKKKKNIVTAFSKAIFGYKFNIEDLLLIENDEKNKLTFNDENIDDIFNELSHSLDDKQMDLLTKTREIYFKFKLNMIVPTGYTLSESMIEKYEMHKAHLKMYKEFINTLNTKDRKILKNAYSDYINTEKAKAANAQENFYKTVKKIIKDNNSDTAKKIIVLIDEGNFMPKQRTGENGVIPHQLHQIELDRIIENQAKYYPWLAEANPVEKNRKFAKYKLDELVTFRVPYYVGPLIDKTESNKNEKETKFAWMVRKAKGTITPWNFENLVDRTESANRFIKRMTSKDTYIIGEDVLPASSLLYEKFKVLNELNNIKVNEKKLDIEQKQDIYLNLFTTAKNVTKKSLATYLNCSADSISGLSDGEKFNSSLSSYIDLKAILGNIVDDCNKNEDLEKIIEYSTVFEDGNIYKEKLSEISWLTDEQIEKLSNIHFKGWGRLSKKLLTQITNENGERIIDALWNTSNNFMQIINDESIQAKLAEINGKYAGKSDLEDILSEAYTSPQNKKAIRQVMKVVEDIEKAMQCEPTSISIEFTRKKQKSRLTNTRYKKISDVYEKIADEVISEYELRKLQSELDSNANNMRDRYYLYFMQLGRDMYTGEKINIDELHQRYDIDHILPQSFIKDDSINNRVLTRKDVNNKEKSDKTAADLYAVEMSDFWRKLRKQGLITEQKYKNLLTKSDSIDKYAKKGFIKRQLVETSQVVKLVANILQDKYSDTKIIEVRAKLNSNLREEYKLIKNRAVNDYHHAIDGYLTTFIGQYLYKTYPKLRSYFVYNDFKKLDSNYLKHMKKFNFLWQLQDDKTIDIYDNVNNKFVLNVPEMKKYIQKIYNYKYMLVSKEVTTKNGAFYDQTKYNAKTVNLIPIKKNKPTNIYGGYKGKVSSYMMLVKIRKKKEVIYKFVGVPRLWTDELDRLKDTTERKILLNEIAKNSLSKTEQDFEVILDKVYYGQLIIDGNQKYTLGSSEYKYNAMQLHLSKHALEVLAKENVKDAEITDKDLVSVYEEILSVVNKYFELYDINKFRQKLNEGLEIFRKLPVYNVYESNKIKQVGKFEVLNRILMGLHANAMITDLKVLGIKTKLGQMQVNGGIKLSPDAKLIYQSPTGIFSRAVRVKDLG

SEQ ID NO: 292 - protein, 1331 aa, Lactobacillus sanfranciscensis
MNKQPYNIGLDIGTSSVGWSATELDNRLLHIKGHNGIGVRLFKEGESAADRRGFRTTRRRLARRKWRLRLLNEIFATEIAKVDPSFFARLKQSNVSPKDPNKTMFENILFDDENLDDQKFHHDYKTIYHLRQAIINHPEQKFDIRLIYLAMHHIIKYRGHFLNQANVQDFKGGKIDLEKSFKALNDIFENQGRDLRLVTDKANQYVKVLSDNAKTRSDRKKELSKLLYVPIDKDTDKNSKKVTGEILKAILGNKAKFDVIFGIEVENPKEWVLTFNSDDFDDKIEGLSSQMTDEDSEILLILKELYFALNLSDILNNSVTDKNAKTLSEAMINRYDDHKNQLAMLKKVIDSSDKKHAKELKEAYSAYIDGENNKKISFEDLKKRIQKNLVDSELSQKINDLLDHDYFLPKQRSKENGAIPHQLQQQELDQIIESQKQYYPFLAELNPNEKRSRQAKYKLDELVAFRVPYYVGPMVEVTDSNQENNGKFAWMIRKEQGEITPWNFDEKVDRTETATKFITRMTTTDTYLIGEPVLPKNSLLYQKFVVLNELNNLKINQEIITPGQKQYLYEHVMKKNKRVTLKKIADALVIKGDYPYAPEVKGTTDQKNLNNGLTTYIDLAKIFGNELDDVDREADFEKIIEWSTIFEDQHIFALKLQELKWLTEKQRNQVVKLRYQGWGKLSKELLAGLVDDNGQRIIDLLWSDNQNFMQIVNQKSFKESIADHNGAHLEEKNLKDVINDLYTSPQNKKAIRQVILVVDDIINAVGYEPANIMMEFAREDSNDHRLTNSRSRQLENVYKDITNSWFDNDSVKDELEDKIKNKDKFTDRLYLYFTQGGKDLYTGEPLNIDDLSSYDIDHILPQSFILDNSLDNRVLTSQRNNRVSKEDQLPGELFGTKMHAFWKRLKAAHLISNKKYYNLTLTPNSISKFNNQGRFINRQLVETRQVIKLAAEILHNRYSEEKGTNIVTIKANLTHHMREKFNFYKNRNVNDYHHAFDAYLTAFVGNWLLQQYPKLKPYFVYGDFAKTEINNLKSFNMLYKFEQAHQLNEKDGKIAKDADALLGYMKNVYHFKKMLVTKKLETNHGALFKQTLYPSPAHDIKKRQLIKPKDNRPTDIYGGYTHEERKYMSLVKVIGKKDNEYRMANVPLLKINKNNDIKEILKSQFSNKKFEIVLPKVLKNQLFSENGALFVIGSKGYKYNANQLVLSDLDMKLLNDLSNNKSIDEVTINQLFKNIVDSTNKYMPLYEIKNLNEVVEKFNNLEFNDKKKTITDFLLATHANPTMSNLKNIGLPSYFGRFTSGNAGIKLSENANVIYQSPTGLFSRKVKISDF

SEQ ID NO: 293 - protein, 1419 aa, Lactobacillus sp.
  source 1..1419: note = 66c
MAKPQNYTIGLDIGTNSVGWTVTDDQNNILRIKSKKAIGARLFEEGKVAAERRSFRTTRRRLSRRKWRIKLLEELFDEEISKVDPNFFARSHESWISPKDKRERYSAIVFPTPEEDKKFHNEYPTIYHLRDRLMKDDQKHDIREIYVAIHHIMKYRGNFLHDESIETYRSGMSSLGGGDERTILNTKILDDLNDAFADNLATQGISVNSASADQINEIVTSGHLNVDSQKAIAKLLLPTTLSSDDKKQDKKIKKLATDAAKNVASAWLGYKANFAAILNIQEVDKDKKKIYSFALQGADEEDKVETLESVLSQDQIEIVDRIIRIRHAIVLGEIIPVGMTLSEAMIEKYDQHAKDLKNLKTVIRNLKDRKNAVKLQAIYDLYVNNRHADTAKAMKLAGVKKRTELLEPEEFNKSIEKLLDDSPVSAEIKKRIAEKDFLPLQRSNSNGVIPNQLHQIELDEIIKKQSKYYPFLGETNEHASADVARKAPTKLDQLLTFRVPYYVGPLITKEEQEEQDGHSFAWMIRKNPKDHEKITPWNFDEKVDRMASATQFIKRMTTKDTYLLGEDVLPSSSLKYQLFTVLNELNNLRINHKKLTREEKEQVIEDLFKKYKTVKADKFKNYWQKGHAGLDVKIQGMADPEKFNSTMSTYIDLQKIFGDQLDDAQRQNDFEKIIEYSTIFEDRKILGEKLRADFVWLSEDQIKRLCRLRLQGWGRLSLKLLTRLTDADGQNVLERLLNSNDNFMQIVKDPVIKAKIEQKNQKLLRADWSENATESILDEAYTSPQNKKAIRQVMRVVHDIVKACDGNLPAKFAIEFARSQDDDPKRTVARADRLQKIYAQISDEVVSQGVKDQLSGMKSLKDRYYLYFMQGGRDAYTGKPLNIDRLSDYDIDHIMPQSFIKDDSLDNRVLVTRAVNNQKSDNVPVLLYGNHLVADLGITIREMWDRWQKSGMISKRKLANLLTDPATLSEYRAEGFINRQLVETSQVIKLTATILQSEFPDSKIIEVPAKYNSILRKQFDLYKSREVNDYHHAIDAYLSTIVGNYLYQVYPNLRRLFVYGEFKKFSHGEEESSHQAVRRVKSMNFLDDLLRGKHGDDIYCRVTGEVIFSRKDIISKLKQAYSFKQMLVTQEVFTKKSALFDQTVYPSPARDSKTRSGLIPRKQGMDTEIYGGYSGNKDAYFVLAQVVKSKGHTLQVVGVPIRALRALANCSNYSEQLLKIVKAQVLFNKKTGKAKKGISDVRILLDKIPYRQPVLDGSAFYMLGSSTYKYNLKQISLSQQSMKYILDYIDDPNFNKHEMTKIDQQNEKECLLSVYDEILDKMDKYLSLYDINGFRKKLHVGRDKFIKLEVEKQAEAIKNVLRGFHANSDMTKLSDLGLSTSLGFMQASDGIKLSDNAVFIYQSPTGLFERRVKVSDLLK

SEQ ID NO: 294 - protein, 1289 aa, Lactobacillus versmoldensis
  source 1..1289: note = KCTC 3814
MRRRYRRRRNRLNWLDELFADELAKIDPSFLLRMKNSWVSKKESTRKRDPYNLFIDEKYNDVDYFNQYPTIFHLRKELITEDKKVDIRLIYLAIHNIIKYRGNFTLENQNFDISQLSSNFSQQISDFFALFSDFGVIMPEDFDPDKISDILLNPNLSPSGKVSEAIATISPKTNVKAKIKIILLLLVGNNGDLKKLFDLETTEKIAVKLSSRHIDSELPIILSELNEQQENIITIANSIFGSIILKDFLGDETSISAAKVISFEDHKQDLQKLKTMWRETSNKEAVKAGKKAYEDYIGHEDSETFYKKIKKFLEKAQPVDLANKALAEIELENYLPKQRNRNNTVIPYQLNENELIAILDHQEKYYPFLKENRDKILSLLTFRIPYYVGPLQDSNNNRFSWMTRKASGAIRPWNFSEKVNVEQSSNDFIKRMRSTDTYLIGEPVLPKKSLIYQCYEVLSELNNTRVKDGSSNPKRLDVTIKQRIYNEIFKNQKSVSVKVLQNWLIKESYFKSPEISGLADKKKYLSSLSTYIDFKKIFGQRFVDDPVNSPQLEELAEWLTLFEDKKILLIKLQNSKYSYDQATINKLSTMRYQGTGKLSKKLLVDLKTTKKSIGKSGAESLSILDLMWSTKDNFMQIIHDADYTFEQQIKEFNYDTEDELTPLEKVANLHGSPALKRGLNQSIKVVADIVKFMGHDPEKIFIEFTRSDDFSKLTISRYRRIKKQYLEIAKAIKKIPAEFKDIKEYQTQLEENKGKLASERLMLYFLQCGHSLYSNKPIDLNMINSSKYHVDHILPQSYIKDDSLENKALVLASENENKIDNMLISHDIIATNLPRWQALKDQNLMGSKKFADLTRTTVTENQKKGFIQRQLVQTSQIVKNITLILNDLYKNTSCIETRATLSSEFRKAFSNFDETTYHYQFPEFVKNRDVNDFHHAQDAFLACVIGEYQLKKYPKDNLRLVYDQYSKFLDSLKKDTRKKNGRMPRYTQNGFIIGSMFNGKTYVDDNGEIIWDQKIKESIRKTFNYHQFNVVRQTIEQHGKLFNDTIQPHSDRYKLIPLKTNRDPAIYGGYNNDNNAYSVVLDVDGKKKINGIPIRIANQLKSDELDLSSWLENNIKHKKPMTILIDKVPKYQRIINEETGDLLITSANEVINNVQLFLPSMYTALISLLDSTKTEMYSKLLSNYEANILIDIYDYLLTKLKNNYPLYRKEWAKLAEHRDDFIESDLVTQASTLQQLIKFMHADPSNVNLKFGNFKGNRFGRKNGNIKLSKTDFIYESPTGLFKSIKHID

SEQ ID NO: 295 - protein, 1372 aa, Legionella pneumophila
  source 1..1372: note = 130b
MESSQILSPIGIDLGGKFTGVCLSHLEAFAELPNHANTKYSVILIDHNNFQLSQAQRRATRHRVRNKKRNQFVKRVALQLFQHILSRDLNAKEETALCHYLNNRGYTYVDTDLDEYIKDETTINLLKELLPSESEHNFIDWFLQKMQSSEFRKILVSKVEEKKDDKELKNAVKNIKNFITGFEKNSVEGHRHRKVYFENIKSDITKDNQLDSIKKKIPSVCLSNLLGHLSNLQWKNLHRYLAKNPKQFDEQTFGNEFLRMLKNFRHLKGSQESLAVRNLIQQLEQSQDYISILEKTPPEITIPPYEARTNTGMEKDQSLLLNPEKLNNLYPNWRNLIPGIIDAHPFLEKDLEHTKLRDRKRIISPSKQDEKRDSYILQRYLDLNKKIDKFKIKKQLSFLGQGKQLPANLIETQKEMETHFNSSLVSVLIQIASAYNKEREDAAQGIWFDNAFSLCELSNINPPRKQKILPLLVGAILSEDFINNKDKWAKFKNFWNTHKIGRTSLKSKCKEIEEARKNSGNAFKIDYEEALNHPEHSNNKALIKIIQTIPDIIQAIQSHLGHNDSQALIYHNPFSLSQLYTILETKRDGFHKNCVAVTCENYWRSQKTEIDPEISYASRLPADSVRPFDGVLARMMQRLAYEIAMAKWEQIKHIPDNSSLLIPIYLEQNRFEFEESFKKIKGGSSDKTLEQAIEKQNIQWEEKFQRIINASMNICPYKGASIGGQGEIDHIYPRSLSKKHFGVIFNSEANLIYCSSQGNREKKEEHYLLEHLSPLYLKHQFGTDNVSDIKNFISQNVANIKKYISFHLLTPEQQKAARHALFLDYDDEAFKTITKFLMSQQKARVNGTQKFLGKQIMEFLSTLADSKQLQLEFSIKQITAEEVHDHRELLSKQEPKLVKSRQQSFPSHAIDATLTMSIGLKEFPQFSQELDNSWFINHLMPDEVHLNPVRSKEKYNKPNISSTPLFKDSLYAERFIPVWVKGETFAIGFSEKDLFEIKPSNKEKLFTLLKTYSTKNPGESLQELQAKSKAKWLYFPINKTLALEFLHHYFHKEIVTPDDTTVCHFINSLRYYTKKESITVKILKEPMPVLSVKFESSKKNVLGSFKHTIALPATKDWERLFNHPNFLALKANPAPNPKEFNEFIRKYFLSDNNPNSDIPNNGHNIKPQKHKAVRKVFSLPVIPGNAGTMMRIRRKDNKGQPLYQLQTIDDTPSMGIQINEDRLVKQEVLMDAYKTRNLSTIDGINNSEGQAYATFDNWLTLPVSTFKPEIIKLEMKPHSKTRRYIRITQSLADFIKTIDEALMIKPSDSIDDPLNMPNEIVCKNKLFGNELKPRDGKMKIVSTGKIVTYEFESDSTPQWIQTLYVTQLKKQP

SEQ ID NO: 296 - protein, 1372 aa, Legionella pneumophila
MESSQILSPIGIDLGGKFTGVCLSHLEAFAELPNHANTKYSVILIDHNNFQLSQAQRRATRHRVRNKKRNQFVKRVALQLFQHILSRDLNAKEETALCHYLNNRGYTYVDTDLDEYIKDETTINLLKELLPSESEHNFIDWFLQKMQSSEFRKILVSKVEEKKDDKELKNAVKNIKNFITGFEKNSVEGHRHRKVYFENIKSDITKDNQLDSIKKKIPSVCLSNLLGHLSNLQWKNLHRYLAKNPKQFDEQTFGNEFLRMLKNFRHLKGSQESLAVRNLIQQLEQSQDYISILEKTPPEITIPPYEARTNTGMEKDQSLLLNPEKLNNLYPNWRNLIPGIIDAHPFLEKDLEHTKLRDRKRIISPSKQDEKRDSYILQRYLDLNKKIDKFKIKKQLSFLGQGKQLPANLIETQKEMETHFNSSLVSVLIQIASAYNKEREDAAQGIWFDNAFSLCELSNINPPRKQKILPLLVGAILSEDFINNKDKWAKFKIFWNTHKIGRTSLKSKCKEIEEARKNSGNAFKIDYEEALNHPEHSNNKALIKIIQTIPDIIQAIQSHLGHNDSQALIYHNPFSLSQLYTILETKRDGFHKNCVAVTCENYWRSQKTEIDPEISYASRLPADSVRPFDGVLARMMQRLAYEIAMAKWEQIKHIPDNSSLLIPIYLEQNRFEFEESFKKIKGSSSDKTLEQAIEKQNIQWEEKFQRIINASMNICPYKGASIGGQGEIDHIYPRSLSKKHFGVIFNSEVNLIYCSSQGNREKKEEHYLLEHLSPLYLKHQFGTDNVSDIKNFISQNVANIKKYISFHLLTPEQQKAARHALFLDYDDEAFKTITKFLMSQQKARVNGTQKFLGKQIMEFLSTLADSKQLQLEFSIKQITAEEVHDHRELLSKQEPKLVKSRQQSFPSHAIDATLTMSIGLKEFPQFSQELDNSWFINHLMPDEVHLNPVRSKEKYNKPNISSTPLFKDSLYAERFIPVWVKGETFAIGFSEKDLFEIKPSNKEKLFTLLKTYSTKNPGESLQELQAKSKAKWLYFPINKTLALEFLHHYFHKEIVTPDDTTVCHFINSLRYYTKKESITVKILKEPMPVLSVKFESSKKNVLGSFKHTIALPATKDWERLFNHPNFLALKANPAPNPKEFNEFIRKYFLSDNNPNSDIPNNGHNIKPQKHKAVRKVFSLPVIPGNAGTMMRIRRKDNKGQPLYQLQTIDDTPSMGIQINEDRLVKQEVLMDAYKTRNLSTIDGINNSEGQAYATFDNWLTLPVSTFKPEIIKLEMKPHSKTRRYIRITQSLADFIKTIDEALMIKPSDSIDDPLNMPNEIVCKNKLFGNELKPRDGKMKIVSTGKIVTYEFESDSTPQWIQTLYVTQLKKQP

SEQ ID NO: 297 - protein, 1355 aa, Leuconostoc gelidum
  source 1..1355: note = KCTC 3527
MTYSIGLDIGTGSVGWAVIGDDYRLKRAKGKNLIGVRLFDSATTAAERRGYRTTRRRLSRRHWRLRLLNDIFASDLAEQDENFLPRLKYSWVNPDDEQNPQLNSDVANGALFGSSETDKAFHKNYPTIYHLRHELMTDTAKHDLREVYLAIHHIVKYRGNFLNTADKINAENSFNVDLFIAALDEYNEFLETPITSIKDAQLFSDKLTDINARNKSVRVENAMSETYDDKSKIFKAILTALVGNTANFQTIFDLSDLEKDEAKNFKFKLDLEDVETKLDVVRAKLSDEQNAFLEAVLIAYDGITLKMILGDYKSISQSMIESYKSHQRDWKYIKNNVRLNEQKIEPDKNSVKFFKLDPKKLIYPSNLAYLQVISSNEDEHRKGLDYFKTAIQDADILQRIENDTFLPRQRTKRNGVLPYQLHLAELEQIIKKQSKYYPFLANIYTQDNKTENKLIGLLKFRVPYYVGPLVEAEKVTGDGKNHWLIKKELQENTPITPFNFDDVVDKDKSGEQFIKRITGTDSYLIGEPTLPENSLLYQKYNVLQELNNVRNERHQRLPIKVKQDIFEHVFKIDKNVNAKKVMAYLKLNGYGDFQIAGLSDTRTGKFNSNLSSYNYFVDLLGREKTEKIREDRLEEIIEIQTVFEDKILVAKRLSNLDFLTPQEKSKLSAKHYTGWGRLSQKLLTTQFIKTALSEAGDIIPQSHSIIDLLYYTDKNLMEILNDKTFNVRNWLTEQNKGTESGNSLYDQIDALAGPKDIKRGITQVFSIIDDIKKAMGSNPETVYLEFARETQTSRLTNSRLNRVQEIYNSPELKTEFAYLAKKLEAETKESIHDDRLYLYYLQEGRDMYTGKEIPFDQISSNYDIDHIIPQAFTKDDSLDNRVLVNRATNARKSNSPTFTNDIIDNRKSWWQSLVKRGLMSKEKFERLTDKRKTFSENQTNHFIARQLVETRQIIKNVADLIKNNYDGTQAVAIRASLTGEMRRYLDWPKNRDMNDYHHAHDALMMATVGKYVDRRGFFDNGSVSDGAGNAYNLYTKDWLVAARVGTRNDSQRVNPYGFIVGSMNSKAVRQQVNKETGEIVWGNENLDYLRHVLSYKKILVTRRLSGSSGRLYAETLFSPNPKAKLIAQKANRSVALYGGFTKAESAYTALVEFNKKGDRSYKLIKVPMAIANRVNDKQITVTAYIASLNLRDFSRVVLEHLPLGTLIRESDGSEFYAASSEYKHNAKELWAPKEILRSSKKLDKATADNLIDIFDFLTNDKTISNFKFYEKDLLHLKNVRDKFVEASDEIKIKVLSDVIYELHNDAGWRDPFKHIQEKPAWTMLQVKGGIKLSEKAAIVYQSPTGLFETITIVGE

SEQ ID NO: 298 - protein, 1337 aa, Listeria innocua
  source 1..1337: note = ATCC 33091
MKNMKKPYTIGLDIGTNSVGWAVLTDQYDLVKRKMKIAGDSEKKQIKKNFWGVRLFDEGQTAADRRMARTARRRIERRRNRISYLQGIFAEEMSKTDANFFCRLSDSFYVDNEKRNSRHPFFATIEEEVEYHKNYPTIYHLREELVNSSEKADLRLVYLALAHIIKYRGNFLIEGALDTQNTSVDGIYKQFIQTYNQVFASGIEDGSLKKLEDNKDVAKILVEKVTRKEKLERILKLYPGEKSAGMFAQFISLIVGSKGNFQKPFDLIEKSDIECAKDSYEEDLESLLALIGDEYAELFVAAKNAYSAVVLSSIITVAETETNAKLSASMIERFDTHEEDLGELKAFIKLHLPKHYEEIFSNTEKHGYAGYIDGKTKQADFYKYMKMTLENIEGADYFIAKIEKENFLRKQRTFDNGAIPHQLHLEELEAILHQQAKYYPFLKENYDKIKSLVTFRIPYFVGPLANGQSEFAWLTRKADGEIRPWNIEEKVDFGKSAVDFIEKMTNKDTYLPKENVLPKHSLCYQKYLVYNELTKVRYINDQGKTSYFSGQEKEQIFNDLFKQKRKVKKKDLELFLRNMSHVESPTIEGLEDSFNSSYSTYHDLLKVGIKQEILDNPVNTEMLENIVKILTVFEDKRMIKEQLQQFSDVLDGVVLKKLERRHYTGWGRLSAKLLMGIRDKQSHLTILDYLMNDDGLNRNLMQLINDSNLSFKSIIEKEQVTTADKDIQSIVADLAGSPAIKKGILQSLKIVDELVSVMGYPPQTIVVEMARENQTTGKGKNNSRPRYKSLEKAIKEFGSQILKEHPTDNQELRNNRLYLYYLQNGKDMYTGQDLDIHNLSNYDIDHIVPQSFITDNSIDNLVLTSSAGNREKGDDVPPLEIVRKRKVFWEKLYQGNLMSKRKFDYLTKAERGGLTEADKARFIHRQLVETRQITKNVANILHQRFNYEKDDHGNTMKQVRIVTLKSALVSQFRKQFQLYKVRDVNDYHHAHDAYLNGVVANTLLKVYPQLEPEFVYGDYHQFDWFKANKATAKKQFYTNIMLFFAQKDRIIDENGEILWDKKYLDTVKKVMSYRQMNIVKKTEIQKGEFSKATIKPKGNSSKLISRKTNWDPMKYGGLDSPNMAYAVVIEYAKGKNKLVFEKKIIRVTIMERKAFEKDEKAFLEEQGYRQPKVLAKLPKYTLYECEEGRRRMLASANEAQKGNQQVLPNHLVTLLHHVANCEVSDGKSLDYIESNREMFAELLAHVSEFAKRYTLAEANLNKINQLFEQNKEGDIKAIAQSFVDLMAFNAMGAPASFKFFETTIERKRYNNLKELLNSTIIYQSITGLYESRKRLDD

SEQ ID NO: 299 - protein, 1334 aa, Listeria innocua
MKKPYTIGLDIGTNSVGWAVLTDQYDLVKRKMKIAGDSEKKQIKKNFWGVRLFDEGQTAADRRMARTARRRIERRRNRISYLQGIFAEEMSKTDANFFCRLSDSFYVDNEKRNSRHPFFATIEEEVEYHKNYPTIYHLREELVNSSEKADLRLVYLALAHIIKYRGNFLIEGALDTQNTSVDGIYKQFIQTYNQVFASGIEDGSLKKLEDNKDVAKILVEKVTRKEKLERILKLYPGEKSAGMFAQFISLIVGSKGNFQKPFDLIEKSDIECAKDSYEEDLESLLALIGDEYAELFVAAKNAYSAVVLSSIITVAETETNAKLSASMIERFDTHEEDLGELKAFIKLHLPKHYEEIFSNTEKHGYAGYIDGKTKQADFYKYMKMTLENIEGADYFIAKIEKENFLRKQRTFDNGAIPHQLHLEELEAILHQQAKYYPFLKENYDKIKSLVTFRIPYFVGPLANGQSEFAWLTRKADGEIRPWNIEEKVDFGKSAVDFIEKMTNKDTYLPKENVLPKHSLCYQKYLVYNELTKVRYINDQGKTSYFSGQEKEQIFNDLFKQKRKVKKKDLELFLRNMSHVESPTIEGLEDSFNSSYSTYHDLLKVGIKQEILDNPVNTEMLENIVKILTVFEDKRMIKEQLQQFSDVLDGVVLKKLERRHYTGWGRLSAKLLMGIRDKQSHLTILDYLMNDDGLNRNLMQLINDSNLSFKSIIEKEQVTTADKDIQSIVADLAGSPAIKKGILQSLKIVDELVSVMGYPPQTIVVEMARENQTTGKGKNNSRPRYKSLEKAIKEFGSQILKEHPTDNQELRNNRLYLYYLQNGKDMYTGQDLDIHNLSNYDIDHIVPQSFITDNSIDNLVLTSSAGNREKGDDVPPLEIVRKRKVFWEKLYQGNLMSKRKFDYLTKAERGGLTEADKARFIHRQLVETRQITKNVANILHQRFNYEKDDHGNTMKQVRIVTLKSALVSQFRKQFQLYKVRDVNDYHHAHDAYLNGVVANTLLKVYPQLEPEFVYGDYHQFDWFKANKATAKKQFYTNIMLFFAQKDRIIDENGEILWDKKYLDTVKKVMSYRQMNIVKKTEIQKGEFSKATIKPKGNSSKLIPRKTNWDPMKYGGLDSPNMAYAVVIEYAKGKNKLVFEKKIIRVTIMERKAFEKDEKAFLEEQGYRQPKVLAKLPKYTLYECEEGRRRMLASANEAQKGNQQVLPNHLVTLLHHAANCEVSDGKSLDYIESNREMFAELLAHVSEFAKRYTLAEANLNKINQLFEQNKEGDIKAIAQSFVDLMAFNAMGAPASFKFFETTIERKRYNNLKELLNSTIIYQSITGLYESRKRLDD

SEQ ID NO: 300 - protein, 1334 aa, Listeria monocytogenes
MKNPYTIGLDIGTNSVGWAVLTNQYDLVKRKMKVAGNSDKKQIKKNFWGVRLFDDGQTAVDRRMNRTARRRIERRRNRISYLQEIFAVEMANIDANFFCRLNDSFYVDSEKRNSRHPFFATIEEEVAYHKNYRTIYHLREELVNSSEKADLRLVYLALAHIIKYRGNFLIEGALDTKNTSVDGVYEQFIQTYNQVFMSNIEEGTLAKVEENIEVANILAGKFTRREKFERILQLYPGEKSTGMFAQFISLIVGSKGNFQKVFDLIEKTDIECAKDSYEEDLEALLAIIGDEYAELFVAAKNTYNAVVLSSIITVTATETNAKLSASMIERFDAHEKDLGELKAFIKLHLPKQYQEIFNNAAIDGYAGYIDGKTKQVDFYKYLKTILENIEGADYFIAKIEEENFLRKQRTFDNGAIPHQLHLEELEAIIHQQAKYYPFLREDYEKIKSLVTFRIPYFVGPLAKGQSEFAWLTRKADGEIRPWNIEEKVDFGKSAVDFIEKMTNKDTYLPKENVLPKHSLCYQKYMVYNELTKVRYIDDQGKTNYFSGQEKQQIFNDLFKQKRKVKKKDLELFLRNINHIESPTIEGLEDSFNASYATYHDLLKVGMKQEILDNPLNTEMLEDIVKILTVFEDKPMIKEQLQQFSDVLDGGVLKKLERRHYTGWGRLSAKLLVGIREKQSHLTILDYLMNDDGLNRNLMQLINDSNLSFKSIIEKEQVSTTDKDLQSIVADLAGSPAIKKGILQSLKIVDELVSIMGYPPQTIVVEMARENQTTGKGKNNSKPRYKSLEKAIKEFGSKILKEHPTDNQELKNNRLYLYYLQNGKDMYTGQELDIHNLSNYDIDHIVPQSFITDNSIDNLVLTSSAGNREKGGDVPPLEIVRKRKVFWEKLYQGNLMSKRKFDYLTKAERGGLTDADKARFIHRQLVETRQITKNVANILHQRFNNETDNHGNTMEQVRIVTLKSALVSQFRKQFQLYKVREVNDYHHAHDAYLNGVVANTLLKVYPQLEPEFVYGEYHQFDWFKANKATAKKQFYTNIMLFFGQKERIIDENGEILWDKKYLETIKKVLDYRQMNIVKKTEIQKGEFSKATIKPKGNSSKLIPRKENWDPMKYGGLDSPNMAYAVIIEHAKGKKKLIFEKKIIRITIMERKMFEKDEEAFLEEKGYRHPKVLTKLPKYTLYECEKGRRRMLASANEAQKGNQLVLSNHLVSLLYHAKNCEASDGKSLKYIEAHRETFSELLAQVSEFATRYTLADANLSKINNLFEQNKEGDIQAIAQSFVDLMAFNAMGAPASFKFFEATIDRKRYTNLKELLSSTIIYQSITGLYESRKRLDD

SEQ ID NO: 301 - protein, 1334 aa, Listeria monocytogenes
  source 1..1334: note = FSL J1-194
MKNPYTIGLDIGTNSVGWAVLTDQYDLVKRKMKVAGNSDKKQIKKNFWGVRLFDDGQTAVDRRMNRTARRRIERRRNRISYLQEIFAVEMANIDANFFCRLNDSFYVDSEKRNSRHPFFATIEEEVAYHKNYRTIYHLREELVNSSEKADLRLVYLALAHIIKYRGNFLIEGALDTKNTSVDEVYKQFIQTYNQVFMSNIEEGALAKVEENTEVASILAGKFTRREKFERILRLYPGEKSTGMFAQFISLIVGNKGNFQKVFNLVEKTDIECAKDSYEEDLEALLAIIGDEYAELFVAAKNTYNAVVLSSIITVTATETNAKLSASMIERFDAHEKELGELKAFIKLHLPKQYQEIFNNAEIDGYAGYIDGKTKQVDFYKYLKTTLENVEGADYFITKIEEENFLRKQRTFDNGVIPHQLHLEELEAILHQQAKYYPFLREGYDKIKSLVTFRIPYFVGPLANGQSEFAWLTRKDDGEIRPWNIEEKVDFGKSAVDFIEKMTNKDTYLPKENVLPKHSLCYQKYMVYNELTKIRYIDDQGKTNYFSGREKQQIFNDLFKQKRKVKKKDLELFLRNINHIESPTIEGLEDSFNASYATYHDLLKVGLKQEILDNPLNTEILEDIVKILTVFEDKRMIKEQLEQFSDVLDGVVLKKLERRHYTGWGRLSAKLLVGIRDKQSHLTILDYLMNDDGLNRNLMQLINDSNLSFKSIIEKEQVSTTDKDLQSIVADLAGSPAIKKGILQSLKIVDELVSIMGYPPQTIVVEMARENQTTGKGKNNSKPRYKSLEKAIKDFGSQILKEHPTDNQELKNNRLYLYYLQNGKDIYTGQELDIHNLSNYDIDHIVPQSFITDNSIDNLVLTSSAGNREKGGDVPPLEIVRKRKVFWEKLYQGNLMSKRKFDYLTKAERGGLTEADKARFIHRQLVETRQITKNVANILHQRFNKETDNHGNTMEQVRIVTLKSALVSQFRKQFQLYKVREVNDYHHAHDAYLNGVVANTLLKVYPQLEPEFVYGEYHQFDWFKANKATAKKQFYTNIMLFFAQKERIIDENGEILWDKKYLETIKKVLDYRQINIVKKTEIQKGEFSKATIKPKGNSSKLIPRKENWDPMKYGGLDSPNMAYAVIIEHAKGKKKIVIEKKLIQINIMERKMFEKDEEAFLEEKGYHQPKVLTKLPKYTLYECEKGRRRMLSSANEAQKGNQLVLSNHLVSLLYHAKNCEASDGKSLKYIEAHRETFSELLAQVSEFATKYTLADANLSKINNLFEQNKEGDIKAIAQSFVDLMAFNAMGAPASFKFFEATIDRKRYTNLKELLSSTIIYQSITGLYESRKRLDD

SEQ ID NO: 302 - protein, 1334 aa, Listeria monocytogenes
  source 1..1334: note = FSL J1-208
MKNPYTIGLDIGTNSVGWAVLTDQYDLVKRKMKVAGNSDKKQIKKNFWGVRLFDEGETAADRRMNRTARRRIERRRNRISYLQEIFALEMANIDANFFCRLNDSFYVDSEKRNSRHPFFATIEEEVAYHKNYRTIYHLREELVNSSEKADLRLVYLALAHIIKYRGNFLIEGALDTKNTSVDGVYKQFIQTYNQVFISNIEEGTLAKMEENTTVADILAGKFTRKEKLERILQLYPGEKSTGMFAQFISLIVGSKGNFQKVFDLVEKTDIECAKDSYEEDLEALLAIIGDEYAELFVAAKNTYNAVVLSSIITVTDTETNAKLSASMIERFDAHEKDLSELKAFIKLHLPKQYEEIFSNVAIDGYAGYIDGKTKQVDFYKYLKTLLENIEGADYFIAKIEEENFLRKQRTFDNGAIPHQLHLEELEAILHQQAKYYPFLKEAYDKIKSLVTFRIPYFVGPLANGQSDFAWLTRKADGEIRPWNIEEKVDFGKSAVDFIEKMTNKDTYLPKENVLPKHSLYYQKYMVYNELTKVRYIDDQGKTNYFSGQEKQQIFNDYFKQKRKVSKKDLEQFLRNMSHIESPTIEGLEDSFNSSYATYHDLLKVGIKQEVLENPLNTEMLEDIVKILTVFEDKRMIKEQLQQFSDVLDGAVLKKLERRHYTGWGRLSAKLLVGIRDKQSHLTILDYLMNDDGLNRNLMQLINDSNLSFKSIIEKEQVSTTDKDLQSIVADLAGSPAIKKGILQSLKIVDELVSIMGYPPQTIVVEMARENQTTVKGKNNSRPRYKSLEKAIKEFGSQILKEHPTDNQELRNNRLYLYYLQNGKDMYTGQELDIHNLSNYDIDHIVPQSFITDNSIDNLVLTSSAGNREKGDDVPPLEIVRKRKVFWEKLFQGNLMSKRKFDYLTKAERGGLTEADKATFIHRQLVETRQITKNVANILHQRFNNETDNHGNNMEQVRIVMLKSALVSQFRKQFQLYKVREVNDYHHAHDAYLNGVVANTLLKVYPQLEPEFVYGEYHQFDWFKANKATAKKQFYTNIMLFFAQKERIIDENGEILWDKKYLETIKKVLDYRQMNIVKKTEIQKGEFSKATIKPKGNSSKLIPRKENWDPMKYGGLDSPNMAYAVIIEHAKGKKKVVFEKKIIRITIMERKAFEKDEKSFLEKQGYRQPKVLTKLPKYTLYECENGRRRMLASANEAQKGNQQVLKGQLITLLHHAKNCEASDGKSLDYIESNREMFGELLAHVSEFAKRYTLADANLSKINQLFEQNKDNDIKVIAQSFVNLMAFNAMGAPASFKFFEATIERKRYTNLKELLSATIIYQSITGLYEARKRLDG

SEQ ID NO: 303 - protein, 1334 aa, Listeria monocytogenes
  source 1..1334: note = FSL N3-165
MKKPYTIGLDIGTNSVGWAVLTDQYDLVKRKMKISGDSEKKQIKKNFWGVRLFEKGETAAKRRMSRTARRRIERRRNRISYLQEIFAIQMNEVDDNFFNRLKESFYAESDKKYNRHPFFGTVEEEVAYYKDFPTIYHLRKELIDSQKKADLRLVYLALAHIIKYRGHFLIEGALDTKNTSIDEMFKQFLQIYNQVFANDIEEASLKKTEKNQEVAQILAEKFTRKDKLDKILSLYPGEKTTGVFAQFVNIIVGSTGKFKKHFNLHEKKDINCAEDTYDTDLESLLAIIGDEFAEVFVAAKNAYNAVVLSNIITVTDSTTRAKLSASLIERFENHKEDLKKMKRFVRTYLPEKYDEIFDDTEKHGYAGYISGKTKQADFYKYMKATLEKIEGADYFIAKIEEENFLRKQRTFDNGVIPHQLHLEELEAILHQQAKYYPFLREDYEKIKSLVTFRIPYFVGPLAKGQSEFAWLTRKADGEIRPWNIEEKVDFGKSAVDFIEKMTNKDTYLPKENVLPKHSLCYQKYMVYNELTKVRYIDDQGKTNYFSGQEKQQIFNDLFKQKRKVKKKDLELFLRNINQIESPTIEGLEDSFNASYATYHDLLKVGMKQEILDNPLNTEMLEDIVKILTVFEDKRMIKEQLQQFSDVLDGTVLKKLERRHYTGWGRLSAKLLVGIRDKQSHLTILDYLMNDDGLNRNLMQLINDSNLSFKSIIEKEQVSTTDKDLQSIVAELAGSPAIKKGILQSLKIVDELVSVMGYPPQTIVVEMARENQTTNKGKNNSKPRYKSLEKAIKEFGSQILKEHPTDNQELKNNRLYLYYLQNGKDMYTGQELDIHNLSNYDIDHIVPQSFITDNSVDNLVLTSSAGNREKGDNVPPLEIVQKRKIFWEKLYQGNLMSKRKFDYLTKAERGGLTEADKARFIHRQLVETRQITKNVANILHQRFNYKTDGNKDTMETVRIVTLKSALVSQFRKQFQFYKVREVNDYHHAHDAYLNGVVANTLLKVYPQLEPEFVYGEYHQFGWFKANKATAKKQFYTNIMLFFAQKDRIIDENGEILWDKRYLETVKKVLGYRQMNIVKKTEIQKGEFSNVTPNPKGKSNKLIPRKKDWDPIKYGGFDGSKMAYAIIIEYEKQKRKVRIEKKLIQINIMEREAFEKDEKTFLEEKGYHQPKVLIKVPKYTLYECKNGRRRMLGSANEAHKGNQMLLPNHLMALLYHAEKYEAIDGESLAYIEVHRALFDELLAYISEFARKYTLSNDRLDEINMLYERNKDGDVKSIAESFVSLKKFNAFGVHQDFSFFGTKIERKRDRKLNELLNSTIIYQSITGLYESRKRLDN

SEQ ID NO: 304 - protein, 1334 aa, Listeria monocytogenes
  source 1..1334: note = FSL R2-503
MKNPYTIGLDIGTNSVGWAVLTDQYDLVKRKMKVAGNSDKKQIKKNFWGVRLFDDGQTAVDRRMNRTARRRIERRRNRISYLQEIFAVEMANIDANFFCRLNDSFYVDSEKRNSRHPFFATIEEEVAYHKNYRTIYHLREELVNSSEKADLRLVYLALAHIIKYRGNFLIEGALDTKNTSVDEVYKQFIQTYNQVFMSNIEEGALAKVEENTEVASILAGKFTRREKFERILRLYPGEKSTGMFAQFISLIVGNKGNFQKVFNLVEKTDIECAKDSYEEDLEALLAIIGDEYAELFVAAKNTYNAVVLSSIITVTATETNAKLSASMIERFDAHEKELGELKAFIKLHLPKQYQEIFNNAEIDGYAGYIDGKTKQVDFYKYLKTTLENVEGADYFITKIEEENFLRKQRTFDNGVIPHQLHLEELEAILHQQAKYYPFLREGYDKIKSLVTFRIPYFVGPLANGQSEFAWLTRKDDGEIRPWNIEEKVDFGKSAVDFIEKMTNKDTYLPKENVLPKHSLCYQKYMVYNELTKIRYIDDQGKTNYFSGREKQQIFNDLFKQKRKVKKKDLELFLRNINHIESPTIEGLEDSFNASYATYHDLLKVGLKQEILDNPLNTEILEDIVKILTVFEDKRMIKEQLEQFSDVLDGVVLKKLERRHYTGWGRLSAKLLVGIRDKQSHLTILDYLMNDDGLNRNLMQLINDSNLSFKSIIEKEQVSTTDKDLQSIVADLAGSPAIKKGILQSLKIVDELVSIMGYPPQTIVVEMARENQTTGKGKNNSKPRYKSLEKAIKDFGSQILKEHPTDNQELKNNRLYLYYLQNGKDIYTGQELDIHNLSNYDIDHIVPQSFITDNSIDNLVLTSSAGNREKGGDVPPLEIVRKRKVFWEKLYQGNLMSKRKFDYLTKAERGGLTEADKARFIHRQLVETRQITKNVANILHQRFNKETDNHGNTMEQVRIVTLKSALVSQFRKQFQLYKVREVNDYHHAHDAYLNGVVANTLLKVYPQLEPEFVYGEYHQFDWFKANKATAKKQFYTNIMLFFAQKERIIDENGEILWDKKYLETIKKVLDYRQINIVKKTEIQKGEFSKATIKPKGNSSKLIPRKENWDPVKYGGLDSPNMAYAVIIEHAKGKKKIVIEKKLIQINIMERKMFEKDEEAFLEEKGYHQPKVLTKLPKYTLYECEKGRRRMLSSANEAQKGNQLVLSNHLVSLLYHAKNCEASDGKSLKYIEAHRETFSELLAQVSEFATKYTLADANLSKINNLFEQNKEGDIKAIAQSFVDLMAFNAMGAPASFKFFEATIDRKRYTNLKELLSSTIIYQSITGLYESRKRLDD

SEQ ID NO: 305 - protein, 1334 aa, Listeria monocytogenes
  source 1..1334: note = serotype 1/2a str. F6854
MKNPYTIGLDIGTNSVGWAVLTNQYDLVKRKMKVAGNSDKKQIKKNFWGVRLFDDGQTAVDRRMNRTARRRIERRRNRISYLQEIFAVEMANIDANFFCRLNDSFYVDSEKRNSRHPFFATIEEEVAYHDNYRTIYHLREKLVNSSEKADLRLVYLALAHIIKYRGNFLIEGALDTKNTSVDEVYKQFIETYNQVFMSNIEEGALAKVEENIEVANILAGKFTRREKFERILQLYPGEKSTGMFAQFISLIVGSKGNFQKVFDLIEKTDIECAKDSYEEDLETLLAIIGDEYAELFVAAKNTYNAVVLSSIITVTDTETNAKLSASMIERFDAHEKDLVELKAFIKLNLPKQYEEIFSNAAIDGYAGYIDGKTKQVDFYKYLKTILENIEGSDYFIAKIEEENFLRKQRTFDNGAIPHQLHLEELEAIIHQQAKYYPFLKEDYDKIKSLVTFRIPYFVGPLANGQSEFAWLTRKADGEIRPWNIEEKVDFGKSAVDFIEKMTNKDTYLPKENVLPKHSLCYQKYMVYNELTKIRYIDDQGKTNYFSGREKQQVFNDLFKQKRKVKKKDLELFLRNINHIESPTIEGLEDSFNASYATYHDLLKVGMKQEILDNPLNTEMLEDIVKILTVFEDKPMIKEQLQQFSDVLDGGVLKKLERRHYTGWGRLSAKLLVGIREKQSHLTILDYLMNDDGLNRNLMQLINDSNLSFKSIIEKEQVSTTDKDLQSIVAELAGSPAIKKGILQSLKIVDELVSIMGYPPQTIVVEMARENQTTGKGKNNSKPRYKSLEKAIKEFGSQILKEHPTDNQELKNNRLYLYYLQNGKDMYTGQELDIHNLSNYDIDHIVPQSFITDNSIDNLVLTSSAGNREKGGDVPPLEIVRKRKVFWEKLYQGNLMSKRKFDYLTKAERGGLTEADKARFIHRQLVETRQITKNVANILYQRFNKETDNHGNTMEQVRIVTLKSALVSQFRKQFQLYKVREVNGYHHAHDAYLNGVVANTLLKVYPQLEPEFVYGEYHQFDWFKANKATAKKQFYTNIMLFFAQKERIIDENGEILWDKKYLETIKKVLDYRQMNIVKKTEIQKGEFSKATIKPKGNSSKLIPRKENWDPMKYGGLDSPNMAYAVIIEHAKGKKKIVIEKKLIQINIMERKMFEKDEEAFLEEKGYRHPKVLTKLPKYTLYECEKGRRRMLASANEAQKGNQLVLSNHLVSLLYHAKNCEASDGKSLKYIEAHRETFSELLAQVSEFATRYTLADANLSKINNLFEQNKEGDIKAIAQSFVDLMAFNAMGAPASFKFFEATIDRKRYTNLKELLSSTIIYQSITGLYESRKRLDD

SEQ ID NO: 306 - protein, 1087 aa, Listeriaceae bacterium
  source 1..1087: note = TTU M1-001
MKKLVLGLDIGVASVGWGIIDAENGDVVDTGVRLFSSRDASENESRRTSRQSRRLSRRKKHRRERIKQLLLAHDMDICDIVNENPYELRVKGLNEKLEVSEIYVALTHLAKRRGVSYLDDVVEEGGTIKSEHLNKNMEEIKSGKMPCEIQLERFEKYGQVRGMIEINQDTEESSFLVNIFRTSDYIKEAKTILATQQKFHKQITNEFIDEYIHIMASKRDYFIGPGNEKSRTDYGVYRTNGDTWDNLFEILIGKCSVFPEETRAARSSYVAQEFNLLNDLNNLKISNLESGKLSASQKHDIVEKVKNSKKFGTKDLLKYIASVCECKIEDIGGCRVDKNRKPIMHTFENYRKVHNALNEAGVDLRLSETDYDELMKIMTLNSETLEIKKQCKEKLPQLTEDYLNVCLVLNKKGAFSGWHALSLKAMKLMMPELYGTSKNQMQIIHTMQLGKAYLKPLNQQKYLNSEAILEEIYNPIAARSIRQTIKVTNAILKKYGHLDSVIIEMPRDYQTSEDERKMIEKMQKENEKEKKAALKRAREEYPFPDEAFRNHKELATKLRLWYQQDQFCVYSGRKISVVDLVRNPNQFEIDHIIPQSVSLDDSLNNKVLCFSEENQKKGQQTPFYYHKGKSGNWTYEQYKLFVEKLFDKKKISNKKRELLLFEEDINKWDVRRGFIARNLVDTRYASRVILNSYQQYFGNHEMGTKVKVVRGKFTSQLRKKWRIFKDRNESHSHHAIDALIVAATANLRLWKKNTLGVSDEGKVYDKETGEILPFEKLTESEYNEMMNKEPYLNFKTKLQNIETKVKYSYRVSKKVNRKISDATIYSTRERDGIDYIVGKIKNIYDVKTYKDQFLKRYKKNKEQFLMYQHDPQTFAILENIMATYQDAENPFLAYKKEYGVIRKYSKKGGGSPVTSLKFIDKVLGQKIDLTAKNQAALPKNKKVVLQSITPYRADVYYDEIDKRYHLIGVKYSLFSFSKQGYVINPIAYQKLLEKEQIHSEMKFCFSLYREDIIEFGEDPDSLTRYRFWSKNESGKNKIEVKPIEKPNFEKQTVLTITKKIKILNKYQTDVLGNSFKAQEEKDPRNIE

SEQ ID NO: 307 - protein, 1345 aa, Marinilabilia sp.
  source 1..1345: note = AK2
MKKILGLDLGTTSIGWAFIKEPEKDVVGSEIVDMGVRIVALSSDEENDFAKGNTISINADRTLKRGARRNLQRFKLRRDALLEIFKEMKLIPSNFKYAEDGPSSTFSTLKLRDKAAKEKIELDDLVKVLLQINKKRGYRSSRKAKSEEDDGSAIDSMGIAKELYENDLTPGQWVFEALQKGRKNVPDFYRSDLQEEFKKIVNYQSEFYPDVLNSSFVEDWMGKASTPTKQYFNKKGVHLAENKGKREERRLQEYNWRAVAVNSKIDLSEIALILSQINSQISNSSGYLGAISDRSKELYFKNQTVGQYLYQQIKINPHTRLKGQVFYRQDYLDEFEKIWSVQSGFHPQLNDALKKEIRDITIFFQRRLKSQKHLISNCEFEDYHKVVPKSHPIFQEFRIWQNLNNLTLIKKDNLNEKSELALEDKIALANELAFKREQSVKDALNILGLKSSEWEFNFTKIEGNRTNHAFFEAFAKIIEIEDGEPLDLGNLKADDILDQFSEAFLRIGIDPGLLQVNNDIEGPNYEKQPYIQFWHLLYSSEDDQKLKQNLIKKFGFKPDHAKILASISLQDDHASLSSRAIKKILPHLQSGLIYDKACTYAGYNHSSSFTKEENEKRELSSELDLLKKNSLRNPVVEKILNQMINVVNAILKDPNLGKPDEIRVEMARELKANAEQRKNMTSNIASATRDHEKYREILKKEFGLKRVTKNDLLRYKLWLETDGISLYTGKPIEASKLFSKEYDIEHIIPKTRLFDDSFSNKTICERQLNIDKANVTAFSFLQNKLSGDEFEQYQSRVKSLFGKLSKAKIQKLLMANDKIPEDFIARQLQETRYISKKAKEILFEITRRVSVTTGTITDKLREDWGLVEIMKELNWEKYDKLGLTYTIEGKHGERLNKIKDWSKRNDHRHHAMDALTVALTKPAYIQYLNNLNAKELNGKKSTEIFAIEQKYLKRENGKLCFIPPVENIRTEAKKHLSKVLISYKAKNKVVTINKNRTNKKAGFNEQIALTPRGQLHKETVYGKAFHYSTKFEKIGASFDVQKINAVAKKEEREALLKRLAENGDDPKKAFTGKNSLSKMPIYLDLKRNIKLPEKVKTVVLEQNYTIRKNIDPDLKLDKVIDVGVKRILENRLKEFGGNAKLALSNLDENPIWLNKEKGITIKRVKISGVSNVESLHVKKDHFGEPILDQVGNEIPVDFVSTGNNHHVAIYEDEKGNLQEEVVSFFEAVVRQNQGLPIINKNHSLGWKFLFTLKQNEYFVFPSDDFDPTDVDLMDEENYHLISPNLFRVQKFTTKDYFFRHHLETTVEDKSELKGVSFKRLGLPGLNCIKKIRINHLGKIIQVGEY

SEQ ID NO: 308 - protein, 1352 aa, Megasphaera sp.
  source 1..1352: note = UPII 135-E
MKKRNREEYYVGLDIGTSSVGWAVATPDYRIPKFRGHKMWGSRLFAEGKRAAERRQFRTNRRRLARRRDRLQILEELFAEEMAKVDNTFFMRLKESKFFLEDKTVKEKHILFSTDKFDADRFYKDNPTIYHVRKRLMEEEPQDIRELFLAVHHILKYRGHFLFAGSLEQNGASIEELVRTLLGKQGLAILDDTIDSNEMVNILKNTGETKSDRKKDVQELWNPLKDKVKKAQAAEMAGLVLGLKSDISKLFANSDYKDLDSSIKNINFSSGDYEEKRDDYANSIGDDIVLLDTMKALYDTLILSQILQGKRSISAAKVEDYNTHKEQLRALKAILKPHKRLYNEMFRENNKKDLSNYVAYISSYSEGKRVNREGFYKYVQAVLKQVDDSDSKQAILEAIRLETFLPLLRVKDNAVIPHQIHQAELEAILETARKKYNFLNDVSDGVSVKDKIIQLFTFRIPYYVGPLNPHSGETVADRKQGTGWVVRKQRGKVYPWNFADMVDVKASAEAFITNLTNKCTYLIGEDVLPKRSLLYSEFMLLNELNMIKYDGHELPVAIKQLYIEQVFKQEHKKQTKGRVLDFLKRNGLITGSATAVITGMDDAIKGDLQSYRDMVRIFGAGFDHSMAERIIRWVTLFGEAKDILENKIREVYGNSISDSQMRAIKKLKYADWGRLSQAFLIAVKGCDKSGVERNIITCLRASSQNLMEILSDQGTYIKQIKAWNHQHTTNMMDTLDYQLVDDLYVAPSVKRSIWQSLCIVEELVKIMGQAPKKIFVEVTRTKQAEKTKKDSRKKRLVELYTAIGKEGAAWKKEIEAHQAGDFRRKKLYLYYTQMGRCMYSNEPIAMDALFTSAYDIDHIYPQSLTKDGSWDNLVLVKSQLNKEKSDQYPLRPAIREKNKAHWQYLCRAGFISEKKYERLMRTTELTAEELSGFIARQLVETSQATKAVTGLLERIYTNTEICFVKAETVSQFRHQHNFIKIRELNNYHHAKDAYLNIVVGNVYHEKFTKNPWEFIARSTERRPYNLNRMYDFDLLKQGRVIWQVPKSLETVQAMMKSNDVRITKKLLVQKGELYDATITKAHKAKEGTYFPLKGADARLRDVHRYGGYEKIKIAYYSVFSCREKASNTIHTLIIPIPVYKAGLLQTEADLTAYAWQTKQKTKPIKDIYSAITPIYKKLCINTVVKIDGFKYFLGGKTGDYMWLDPAIPVVLDEQAAAYLKAISKVGRADDVENTAQAIDLITAEANEAFYDVLLKKMEAKIFAKAYQTIVEKLASETARERFRELSIGAQCSCLLEILNLLANNKTTFTFFKDKMGVTMSRRKQPMDLTKLEECIVYETSITGLYEKAVSLL

SEQ ID NO: 309 - protein, 1080 aa, Methylocystis sp.
  source 1..1080: note = ATCC 49242
MRVLGLDGGIASIGWALIEIFEDHEPSDGRIIDTGAWMFDAPEEKSQTGTKLKSELRRIFRGQRRVIRRRRQRMNEVRRILHRHGLLSSDNRDALKQPGLDPWKIRAEGIDRLLSPIEFAVALGHIARHRGFKSNSKGAKTSDLDAESSRMKKAVGETREKLARFGSPAKLLVEDEGFVLRQTKLKSGALETVRRFRNRDGDYSRSLLRDDLAAEVRALFRAQARLQSTFAKVELEAEFTQAAFFQRPLQDSERLVGPCPFEPAEKRSPKRGYSFELFRFLSRLNHLTLREGSEERTLTVEELRTAAADFGGVAKFTFSTLRKRLALPDIAIFVGIKADDEKKLDVVARSGEAATGTARLRRVVIDALGELAWGALISAPERLDKITEIITFRSDLDRIRAGLIEAGFDTPLIEAIVRAAADGKLDAFTGVGHISAKAARNIIPGLMRGMTYDKACAAAGYDHTASRERDAFDVGMHGKEALKKILQEERISRELVGSPSARKALIEAVKQVKAIIEKYGVPDRIHVELARDVGKSIEERRDIHFGIEKRSRQKDKLRELFGKEVGHLPQDGERGKEELLRFELWNEQMGRCLYTDEYINPKQLVASDNSVQVDHILPWSRFGDDSYLNKTLCTAKANQDKKGRTPYEWFRADKPEAEWDAFVARVESIQFMKGLKKRNYKLKNAEEAAEKFRSRNLNDTRWTCRLLAEALKQLYPKGEKDKDGKERRRVFTRPGALTNRLRRAWSLQRRKKSEKGERIADDRHHALDAIIVAATTESLLIRATREVQDIERKGLHYDLTKNITQPWPGFADEALDAVEKVFVARAERRRARGKAHDATIRHIAVRDDEAKVYERKKVGDIKLGDLIRVKDAERNAPLIENLRKWIEAGSPRDNPPLSPKGDPVSKVRLVTKNKVNITLDTGNPERLATVDRGEMARVDVFRKANRKGKYEYYLVPIYPHEIATMETPPMRAVQGGGDDDKWPEIDSTFEFLWSINQLSLLELTKPDGEVIRSYFRSLDRNTGALTVSGIANSTATRKGIGTRTLIDFKKLHVDRLGQIFEVERELRTWRGETWRGKDCI

SEQ ID NO: 310 - protein, 1082 aa, Methylosinus trichosporium
  source 1..1082: note = OB3b
MRVLGLDAGIASLGWALIEIEESNRGELSQGTIIGAGTWMFDAPEEKTQAGAKLKSEQRRTFRGQRRVVRRRRQRMNEVRRILHSHGLLPSSDRDALKQPGLDPWRIRAEALDRLLGPVELAVALGHIARHRGFKSNSKGAKTNDPADDTSKMKRAVNETREKLARFGSAAKMLVEDESFVLRQTPTKNGASEIVRRFRNREGDYSRSLLRDDLAAEMRALFTAQARFQSAIATADLQTAFTKAAFFQRPLQDSEKLVGPCPFEVDEKRAPKRGYSFELFRFLSRLNHVTLRDGKQERTLTRDELALAAADFGAAAKVSFTALRKKLKLPETTVFVGVKADEESKLDVVARSGKAAEGTARLRSVIVDALGELAWGALLCSPEKLDKIAEVISFRSDIGRISEGLAQAGCNAPLVDALTAAASDGRFDPFTGAGHISSKAARNILSGLRQGMTYDKACCAADYDHTASRERGAFDVGGHGREALKRILQEERISRELVGSPTARKALIESIKQVKAIVERYGVPDRIHVELARDVGKSIEEREEITRGIEKRNRQKDKLRGLFEKEVGRPPQDGARGKEELLRFELWSEQMGRCLYTDDYISPSQLVATDDAVQVDHILPWSRFADDSYANKTLCMAKANQDKKGRTPYEWFKAEKTDTEWDAFIVRVEALADMKGFKKRNYKLRNAEEAAAKFRNRNLNDTRWACRLLAEALKQLYPKGEKDKDGKERRRVFSRPGALTDRLRRAWGLQWMKKSTKGDRIPDDRHHALDAIVIAATTESLLQRATREVQEIEDKGLHYDLVKNVTPPWPGFREQAVEAVEKVFVARAERRRARGKAHDATIRHIAVREGEQRVYERRKVAELKLADLDRVKDAERNARLIEKLRNWIEAGSPKDDPPLSPKGDPIFKVRLVTKSKVNIALDTGNPKRPGTVDRGEMARVDVFRKASKKGKYEYYLVPIYPHDIATMKTPPIRAVQAYKPEDEWPEMDSSYEFCWSLVPMTYLQVISSKGEIFEGYYRGMNRSVGAIQLSAHSNSSDVVQGIGARTLTEFKKFNVDRFGRKHEVERELRTWRGETWRGKAYI

SEQ ID NO: 311 - protein, 1123 aa, Mobiluncus curtisii
  source 1..1123: note = subsp. holmesii ATCC 35242
MFVYLNSPRGFGPATFLTDLPHFCIIFGNNDFMDNRKYHVGIDVGTNSVGFAAVEVGDSGSPIRFLNTMVVIHDSGVDPEQKKYAITRLASAGTARRTRRLYRTRRQRLRELDDFISNELGYPLVNLENFADPYEPWKVRADLATIKLPADELPEAMSIALRHMARHRGWRSPYQRVEALHLHAEISEEFSALKKRVMEKTGDVFSDDATPAEVLVDLMGRQKIRGADGMLSGKLRQSDNANELRKIASVQGIDDETLNRIIDRVFFSRSPKGKASERVGMDALPGQGSKPRALKAMPSFQKFRIVSVICNLRIKDSGDDNRPLSMEEKEQLIGYLMSSTTDDHVTWTDVAELLHVKRSNLQGTAKEGPDGERPYTRPPVNSAWSKIKDSKIKSLVALWKTGDVDVQSAIVEALSNASVLEDARPGADIVVAYLESLDDKELESLDKVGLPAGRASYSEDSLERLTERMLQDDCDLFEARKREFGVSDDWKPPADPIYAPVGNPGVDRVLKIVNRLLMAAEREWGAPTQINIEHVRSGFSSELMQREFERENERRRAQNEEAVKAILTEKGGNSHVSKYDIIRYYAVKRQNCQCLYCGTPITFSDCELDHIVPRKGVGSTNSRVNLAAACRSCNRDKSNLPFAVWAGKTSNFDVSIDGAVSRVKQWQRSQNEGAREFRAFQNEVISRLLKTTEDPEIDSRSLESVAWMARELHHRVEYYFQSKGAQTQVSVYRGAVTAQARKSSGLEDKVKMIGGGGKTRLDRRHHAMDAATIALMTPGISTTLSEKNNLRDAQKFTGQSETWKDYCGRTETAREHFAVWKSNMERLTDLFNDKLENDAIPVVQPLRLRLSDSKAHDDGIGKLDSKKLGSVWSLADIDRAATPQIWTALTRCDDFDPTKGLPENANRVIRAQGVKYESEDNIPVFPSNVAAIAVRDGYAEIGSTIHHARIYRIDDGKKIFYSMIRVFAVDLLKHQAEDLFTVKLPPSAISIRTCEDSLRRALSNGTAEYLGWLVPGDEIIVDTSDKAFHTGQIGDLLRNFPVNSFRLTGFPSNSRLRLKPVLLAGEGLRDDAEDSIKKILSGQGWRPAINVLFSKGKPRIVRRNSLGIERPSSNNGLPFSWEA

SEQ ID NO: 312 - protein, 1091 aa, Mobiluncus mulieris
  source 1..1091: note = 28-1
MDSRKYRVGIDVGTNSVGFAAVEEDDSGSPTRFLNTMVVIHDSGVDPEQKKYAITRLASAGTARRTRRLYRTRRQRLRELDDFISNELGYPLVNLENFADPYEPWKVRADLATTKLPNDELPEAMSIALRHMARHRGWRSPYQRVEALHLHAEISKEFAALKERVVEKTGDVFSDDATPAEVLVDLMGRQKVRGADGVLSGKLRQSDNANELRKIASVQGIDDETLNRIIDRVFSSKSPKGKASERVGMDALPGQGSKPRALKAMPSFQKFRVVSVICNLRIKDSGGDARPLSMEEKEKLIDYLMSSTTDDHVTWTDVADLLHVKRSQLQGTAKEGFDGERPYTRPPVNSTWSKIKDSKIKSLVALWKTGDVDVQSAIVEALSNASVLEDSRPGADIVVAYLESLDDKELESLDKVGLPAGRASYSEDSLERLTERMLRDDCDLFEARKREFNVADDWKPPADPIYAPVGNPGVDRVLKIVNRLLMAAEREWGAPTQINIEHVRSGFSSELMQREFERENERRRAQNEEAVKAILTEKGGNSRVSKYDITRYYAVKRQHCQCLYCGTPITFSDCELDHIVPRKGVGSTNTRVNLAAACRSCNRDKSNLPFAVWAGKASNFDVSIDDAVSRVKQWQRSQNEGVREFRAFQNEVISRLLKTTEDPEIDSRSLESVAWMARELHHRVEYYFQSKGAQTQVSVYRGAVTAQARKSSGLEDKVKMIGGGGKTRLDRRHHAMDAATIALMTPGISTTLSEKNNLRDAQKFTGQSETWKDYCGRTETARKHFAVWKSNMERLTDLFNDKLENDAIPVVQPLRLRLSNSKAHDDGIGKLDSKKLGSVWSLADIDRAATPQIWTALTRCDDFDPTKGLPENANRVIRAQGVKYESEDNIPVFPSNVAAIAVRDGYAEIGSTIHHARIYRIDDGKKTFYSMIRVFAVDLLKHQAEDLFTVKLPPSAISIRTCEDSLRRALSNGTAEYLGWLVPGDEIIVDTSDKAFHTGQIGDLLRNFPVNSFRLTGFPSNSRLRLKPVLLAGEGLRDDAEDSIKKILLGQGWRPAINVLFSKGKPRIVRRNSLGIERPSSNNGLPFSWEA

SEQ ID NO: 313 - protein, 1091 aa, Mobiluncus mulieris
  source 1..1091: note = FB024-16
MDSRKYRVGIDVGTNSVGFAAVEEDDSGSPTRFLNTMVVIHDSGVDSEQKKYAITRLASAGTARRTRRLYRTRRQRLRELDDFISNELGYPLVNLENFADPYEPWKVRADLATTKLPNDELPEAMSIALRHMARHRGWRSPYQRVEALHLHAEISKEFAALKERVVEKTGDVFSDDATPAEVLVDLMGRQKVRGADGVLSGKLRQSDNANELRKIASVQGIDDETLNRIIDRVFSSKSPKGKASERVGMDALPGQGSKPRALKAMPSFQKFRVVSVICNLRIKDSGGDARPLSMEEKEKLIDYLMSSTTDDHVTWTDVADLLHVKRSQLQGTAKEGFDGERPYTRPPVNSTWSKIKDSKIKSLVALWKTGDVDVQSAIVEALSNASVLEDSRPGADIVVAYLESLDDKELESLDKVGLPAGRASYSEDSLERLTERMLRDDCDLFEARKREFNVADDWKPPADPIYAPVGNPGVDRVLKIVNRLLMAAEREWGAPTQINIEHVRSGFSSELMQREFERENERRRAQNEEAVKAILTEKGGNSRVSKYDITRYYAVKRQHCQCLYCGTPITFSDCELDHIVPRKGVGSTNTRVNLAAACRSCNRDKSNLPFAVWAGKASNFDVSIDDAVSRVKQWQRSQNEGVREFRAFQNEVISRLLKTTEDPEIDSRSLESVAWMARELHHRVEYYFQSKGAQTQVSVYRGAVTAQARKSSGLEDKVKMIGGGGKTRLDRRHHAMDAATIALMTPGISTTLSEKNNLRDAQKFTGQSETWKDYCGRTETARKHFAVWKSNMERLTDLFNDKLENDAIPVVQPLRLRLSNSKAHDDGIGKLDSKKLGSVWSLADIDRAATPQIWTALTRCDDFDPTKGLPENANRVIRAQGVKYESEDNIPVFPSNVAAIAVRDGYAEIGSTIHHARIYRIDDGKKTFYSMIRVFAVDLLKHQAEDLFTVKLPPSAISIRTCEDSLRRALSNGTAEYLGWLVPGDEIIVDTSDKAFHTGQIGDLLRNFPVNSFRLTGFPSNSRLRLKPVLLAGEGLRDDAEDSIKKILLGQGWRPAINVLFSKGKPRIVRRNSLGIERPSSNNGLPFSWEA

SEQ ID NO: 314 - protein, 1473 aa, Mucilaginibacter paludis
  source 1..1473: note = DSM 18603
MKNILGLDLGTNSIGWALIEKDTDQKNGNILGTGSRIIPMSQDIKDEFGKGNSISQTADRTKFRSVRRLRERHLLRRERLHRVLNVLGFLPKHYADQIDFKKRLGKLVNETEPKLVYDNKNFIFKKSFEAMLSDFNQHQPLLLADGKKVPFDWTIYYLRKKALTEKIEKEELAWLILNFNQKRGYYQLRGEEEEENPNKMVAFHSLKIVEVIADESQKGKAETWYSLILENGWIYRRSSKTPLYDWKGKQRDFIVTTDLNDDGSIKTDKEGLEKRSFRAPVEDDWTLVKKKTEQEINRSHKTVGTYIYENLLQDPKQKIKGKLVRTIEREFYKDELKMILKNQQKFHPELNDEHLYINCVRELYRNNQAHQTILSKKDFVHLFIDDIIFYQRPLRSQKSSISNCTLEFRKYKNENGTDQTDYLKAIPKSHPLFQEFRLWQWIYNLGIYQKEDDTNVTDELIKNIDGYQDLFDFLNNKKEIRQDILIKFLVEQTGLKGKPLSSVVAKYRWNFVEDKIYPCNETGTQIRTRLAKVENTPEDFLTAETEIKLWHIIYSVNDKADYEKALKTFAEKHNLDTHSFVENFKKFPPFKSEYGSFSEKAIKKLLPLIRLGKYWSWENIDKKTQERIEKILTGEFDEAIKSRVRDKAIHLTEEDHFQGLQLWLASYVVYGRHSEADNLDKWHTVADLEDYLAEFRQHSLRNPIVEQVITETLRVVKDIWLQYGQGAKDFFSEIHIELAREMKNTGDERKRLTSLVTDNENTNLRIKVLLSELLNDGNVENVRPYSPMQQEALKIFEDGVLNSDIEIEDDILKISKMAQPTNTELKRYKLWLEQKYRSPYTGQIIPLNRLFTADYEIEHIIPQSRFFDDSFSNKIICESAVNQLKDKQLGLEFIKNHSGTIVKLGMGKTAKILDVESYNEFVKGNYTKNISKRNKLMLEEIPDKMIERQLNDTRYISKFIISALSNIVRSESNDDGFNSKNVLPGNGKITSRLKQDWGMNDIWNELILPRFERMNKITDSAVFTAWNENNQKFLPIVPLEFSKGFQKKRIDHRHHALDALVIAASTREHINLLNNEHAKSDKRFDLNRKLRKFEKVAYNDPKTGKRIEKEVPTIFLKPWETFTVDAKNSLESIIVSFKQNLRVINRATNYSESYNDENGALRLGKDGNPLKEKIKQSKGDSWAIRKPMHKDFVYGKVHLQNVKLPKDKFITAIRKSLDVTFDLKRIETITDTGIQKILKNYLHSKENKVELAFSPEGIEDMNQHIERYNDGKKHQPIHKVRVFEIGSRFSLGESGNKKTKFVEAAKGTNLFFAVYQDDNKGKRNYETIPLNIVIERQKLGLHSVPTEDAKGGKLLFHLSPNDMVYVPTSEELEDNLASVNIKRLNTAQRKRIYKVEKASGVECYFIRQDIAYLIKNYDAKTKIGELESQNKLQTTMTDDRLKITDVCVKLNIDRLGSIAETFLGNQYGASKKT

SEQ ID NO: 315 - protein, 1233 aa, Mycoplasma canis
  source 1..1233: note = PG 14
MEKKRKVTLGFDLGIASVGWAIVDSETNQVYKLGSRLFDAPDTNLERRTQRGTRRLLRRRKYRNQKFYNLVKRTEVFGLSSREAIENRFRELSIKYPNIIELKTKALSQEVCPDEIAWILHDYLKNRGYFYDEKETKEDFDQQTVESMPSYKLNEFYKKYGYFKGALSQPTESEMKDNKDLKEAFFFDFSNKEWLKEINYFFNVQKNILSETFIEEFKKIFSFTRDISKGPGSDNMPSPYGIFGEFGDNGQGGRYEHIWDKNIGKCSIFTNEQRAPKYLPSALIFNFLNELANIRLYSTDKKNIQPLWKLSSVDKLNILLNLFNLPISEKKKKLTSTNINDIVKKESIKSIMISVEDIDMIKDEWAGKEPNVYGVGLSGLNIEESAKENKFKFQDLKILNVLINLLDNVGIKFEFKDRNDIIKNLELLDNLYLFLIYQKESNNKDSSIDLFIAKNESLNIENLKLKLKEFLLGAGNEFENHNSKTHSLSKKAIDEILPKLLDNNEGWNLEAIKNYDEEIKSQIEDNSSLMAKQDKKYLNDNFLKDAILPPNVKVTFQQAILIFNKIIQKFSKDFEIDKVVIELAREMTQDQENDALKGIAKAQKSKKSLVEERLEANNIDKSVFNDKYEKLIYKIFLWISQDFKDPYTGAQISVNEIVNNKVEIDHIIPYSLCFDDSSANKVLVHKQSNQEKSNSLPYEYIKQGHSGWNWDEFTKYVKRVFVNNVDSILSKKERLKKSENLLTASYDGYDKLGFLARNLNDTRYATILFRDQLNNYAEHHLIDNKKMFKVIAMNGAVTSFIRKNMSYDNKLRLKDRSDFSHHAYDAAIIALFSNKTKTLYNLIDPSLNGIISKRSEGYWVIEDRYTGEIKELKKEDWTSIKNNVQARKIAKEIEEYLIDLDDEVFFSRKTKRKTNRQLYNETIYGIATKTDEDGITNYYKKEKFSILDDKDIYLRLLREREKFVINQSNPEVIDQIIEIIESYGKENNIPSRDEAINIKYTKNKINYNLYLKQYMRSLTKSLDQFSEEFINQMIANKTFVLYNPTKNTTRKIKFLRLVNDVKINDIRKNQVINKFNGKNNEPKAFYENINSLGAIVFKNSANNFKTLSINTQIAIFGDKNWDIEDFKTYNMEKIEKYKEIYGIDKTYNFHSFIFPGTILLDKQNKEFYYISSIQTVRDIIEIKFLNKIEFKDENKNQDTSKTPKRLMFGIKSIMNNYEQVDISPFGINKKIFE

SEQ ID NO: 316 - protein, 1233 aa, Mycoplasma canis; identical to SEQ ID NO: 315
  source 1..1233: note = PG 14

SEQ ID NO: 317 - protein, 1233 aa, Mycoplasma canis
  source 1..1233: note = UF31
MEKKRKVTLGFDLGIASIGWAIVDSETNQVYKLGSRLFDAPDTNLERRTQRGTRRLLRRRKYRNQKFYNLVKRTEVFGLSSREAIENRFRELSIKYPNIIELKTKALSQEVCPDEIAWILHDYLKNRGYFYDEKETKEDFDQQTVESMPSYKLNEFYKKYGYFKGALSQPTESEMKDNKDLKEAFFFDFSNKEWLKEINYFFNVQKNILSETFIEEFKKIFSFTRDISKGPGSDNMPSPYGIFGEFGDNGQGGRYEHIWDKNIGKCSIFTNEQRAPKYLPSALIFNFLNELANIRLYSTDKKNIQPLWKLSSIDKLNILLNLFNLPISEKKKKLTNANINDIVKKESTKSIMLSVEDIDMIKDEWAGKEPNVYGVGLSGLNIEESAKENKFKFQDLKILNVLINLLDNVGIKFEFKDRNDIIKNLELLDNLYLFLIYQKESNNKDSSIDLFIAKNELLNIENLKLKLKEFLLGAGNEFENHNSKTHSLSKKAIDAILPKLLDNNEGWNLEAIKNYDEEIKSQIEDNSSLMAKQDKKYLNDNFLKDAILPPNVKVTFQQAILIFNKIIQKFSKDFEIDKVVIELAREMTQDQENDALKGIAKAQKSKKSLVEERLEANNIDKSVFNDKYEKLIYKIFLWISQDFKDPYTGAQISTNEIVNNKVEIDHIIPYSLCFDDSSANKVLVHKQSNQEKSNSLPYEYIKQGHSGWNWDEFTKYVKRVFVNNVDSILSKKERLKKSENLLTTSYDGYDKLGFLARNLNDTRYATILFRDQLNNYAEHHLIDNKKMFKVIAMNGAVTSFIRKNMSYDNKLRLKDRSDFSHHAYDAAIIALFSNKTKTLYNLIDPSLNGIISKRSEGYWVIEDRYTGEIKELKKEDWTSIKNNVQARKIAKEIEEYLIDLDDEVFFSRKTKRKTNRQLYNETIYGIAAKTDEDGITNYYKKEKFSILDDKDIYLRLLREREKFVINQSNPEVIDQIIEIIESYGKENNIPSRDEAINIKYTKNKINYNLYLKQYMRSLTKSLDQFSEEFINQMIANKTFVLYNPTKNTTRKIKFLRLVNDVKINDIRKNQVINKFNGKNNEPKAFYENINSLGAIVFKNSANNFKTLSINTQIAIFGDKNWDIEDFKTYNMEKIEKYKEIYGIDKTYNFHSFIFPGTILLDKQNKEFYYISSIQTVRDIIEIKFLNKIEFKDENKNPDTSKTPKRLMFGIKSIMNNYEQVDISPFGINKKIFE

SEQ ID NO: 318 - protein, 1233 aa, Mycoplasma canis
  source 1..1233: note = UF33
MEKKRKVTLGFDLGIASVGWAIVDSETNQVYKLGSRLFDAPDTNLERRTQRGTRRLLRRRKYRNQKFYNLVKRTEVFGLSSREAIENRFRELSIKYPNIIELKTKALSQEVCPDEIAWILHDYLKNRGYFYDEKETKEDFDQQTVESMPSYKLNEFYKKYGYFKGALSQPTESEMKDNKDLKEAFFFDFSNKEWLKEINYFFNVQKNILSETFIEEFKKIFSFTRDISKGPGSDNMPSPYGIFGEFGDNGQGGRYEHIWDKNIGKCSIFTNEQRAPKYLPSALIFNFLNELANIRLYSTDKKNIQPLWKLSSVDKLNILLNLFNLPISEKKKKLTSTNINDIVKKESIKSIMISVEDIDMIKDEWAGKEPNVYGVGLSGLNIEENAKENKFKFQDLKILNVLINLLDNVGIKFEFKDRNDIIKNLELLDNLYLFLIYQKESNNKDSSIDLFIAKNKSLNIENLKLKLKEFLLGAGNEFENHNSKSHSLSKKAIDAILPKLLDNNEGWNLEAIKNYDEEIKSQIEDNSSLMAKQDKKYLNDNFLKDAILPPNVKVTFQQAILIFNKIIQKFSKDFEIDKVVIELAREMTQDQENDALKGMAKAQKSKKSLVEERLEANNIDKSVFNDKYEKLIYKIFLWISQDFKDPYTGAQISVNEIVNNKVEIDHIIPYSLCFDDSSANKVLVHKQSNQEKSNSLPYEYIKQGHSGWNWDEFTKYVKRVFVNNVDSILSKKERLKKSENLLTTSYDGYDKLGFLARNLNDTRYATILFRDQLNNYAEHHLIDNKKMFKVIAMNGAVTSFIRKNMSYDNKLRLKDRSDFSHHAYDAAIIALFSNKTKTLYNLIDPSLNGIISKRSEGYWVIEDRYTGEIKELKKEDWTSIKNNVQARKIAKEIEEYLIDLDDEVFFSRKTKRKTNRQLYNETIYGIAAKTDEDGITNYYKKEKFSILDDKDIYLRLLREREKFVINQSNPEVIDQIIEIIESYGKENNIPSRDEAINIKYTKNKINYNLYLKQYMRSLTKSLDKFSEEFINQMIANKTFVLYNPTKNTTRKIKFLRLVNDVKINDIRKNQVINKFNGKNNEPKAFYENINSLGAIVFKNSANNFKTLSINTQIAIFGDKNWDIEDFKTYNMEKIEKYKEIYGIDKTYNFHSFIFPGTILLDKQNKEFYYISSIQTVRDIIEIKFLNKIEFKDENKNQDTSKTPKRLMFGIKSIMNNYEQVDISPFGINKKIFE

SEQ ID NO: 319 - protein, 1233 aa, Mycoplasma canis
  source 1..1233: note = UFG1
MEKKRKVTLGFDLGIASVGWAIVDSETNQVYKLGSRLFDAPDTNLERRTQRGTRRLLRRRKYRNQKFYNLVKRTEVFGLSSREAIENRFRELSIKYPNIIELKTKALSQEVCPDEIAWILHDYLKNRGYFYDEKETKEDFDQQTVESMPSYKLNEFYKKYGYFKGALSQPTESEMKDNKDLKEAFFFDFSNKEWLKEINYFFNVQKNILSETFIEEFKKIFSFTRDISKGPGSDNMPSPYGIFGEFGDNGQGGRYEHIWDKNIGKCSIFTNEQRAPKYLPSALIFNFLNELANIRLYSTDKKNIQPLWKLSSVDKLNILLNLFNLPISEKKKKLTSTNINDIVKKESIKSIMLSVEDIDMIKYEWAGKEPNVYGVGLSGLNIEESAKENKFKFQDLKILNVLINLLDNVGIKFEFKDRNDIIKNLELLDNLYLFLIYQKESNNKDSSIDLFIAKNKSLNIENLKLKLKEFLLGAGNEFENHNSKTHSLSKKAIDAILPKLLDNNEGWNLEAIKNYDEEIKSQIEDNSSLMAKQDKKYLNDNFLKDAILPPNVKVTFQQAILIFNKIIQKFSKDFEIDKVVIELAREMTQDQENDALKGIAKAQKSKKSLVEERLEANNIDKSVFDDKYEKLIYKIFLWISQDFKDPYTGAKISANEIVNNKVEIDHIIPYSLCFDDSSANKVLVHKQSNQEKSNSLPYEYIKQGHSGWNWDEFTKYVKRVFVNNVDSILSKKERLKKSENLLTTSYDGYDKLGFLARNLNDTRYATILFRDQLNNYAEHHLIDNKKMFKVIAMNGAVTSFIRKNMSYDNKLRLKDRSDFSHHAYDAAIIALFSNKTKTLYNLIDPSLNGIISKRSEGYWVIEDRYTGEIKELKKEDWTSIKNNVQARKIAKEIEEYLIDLDDEVFFSRKTKRKTNRQLYNETIYGIAAKTDEDGITNYYKKEKFSILDDKDIYLRLLREREKFVINQSNPEVIDQIIEIIESYGKENNIPSRDEAINIKYTKNKINYNLYLKQYMRSLTKSLDQFSEEFINQMIANKTFVLYNPTKNTTRKIKFLRLVNDVKINDIRKNQVINKFNGKNNEPKAFYENINSLGAIVFKNSANNFKTLSINTQIAIFGDKNWDIEDFKTYNMEKIEKYKEIYGIDKTYNFHSFIFPGTILLDKQNKEFYYISSIQTVRDIIEIKFLNKIEFKDENKNQDTSKTPKRLMFGIKSIMNNYEQVDISPFGINKKIFE

SEQ ID NO: 320 - protein, 1233 aa, Mycoplasma canis
  source 1..1233: note = UFG4
MEKKRKVTLGFDLGIASVGWAIVDSETNQVYKLGSRLFDAPDTNLERRTQRGTRRLLRRRKYRNQKFYNLVKRTEVFGLSSREAIENRFRELSIKYPNIIELKTKALSQEVCPDEIAWILHDYLKNRGYFYDEKETKEDFDQQTIESMPSYKLNEFYKKYGYFKGALSQPTESEMKDNKDLKEAFFFDFSNKEWLKEINYFFNVQKNILSETFIEEFKKIFSFTRDISKGPGSDNMPSPYGIFGEFGDNGQGGRYEHIWDKNIGKCSIFTNEQRAPKYLPSALIFNFLNELANIRLYSTDKKNIQPLWKLSSIDKLNILLNLFNLPISEKKKKLTSANINDIVKKESTKSIMLSVEDIDMIKDEWAGKEPNVYGVGLSGLNIEESAKENKFKFQDLKILNVLINLLDNVGIKFEFKDRNDIIKNLELLDNLYLFLIYQKESNNKDSSIDLFIAKNESLNIENLKLKLKEFLLGAGNEFENHNSKTHSLSKKAIDAILPKLLDNNEGWNLEAIKNYDEEIKSQIEDNSFLMAKQDKKYLNDNFLKDAILPPNVKVTFQQAILIFNKIIQKFSKDFEIDKVVIELAREMTQDQENDALKGIAKAQKSKKSLVEERLEANNIDKSVFNEKYEKLIYKIFLWISQDFKDPYTGAKISANEIVDNKVEIDHIIPYSLCFDDSSANKVLVHKQSNQEKSNSLPYEYIKQGHSGWNWDEFTKYVKRVFVNNVDSILSKKERLKKSENLLTTSYDGYDKLGFLARNLNDTRYATILFRDQLNNYAEHHLIDDKKMFKVIAMNGAVTSFIRKNMSYDNKLRLKNRNDFSHHAYDAAIIALFSNKTKTLYNLIDPSLNGIISKRSEGYWVIEDRYTGEIKELKKEDWTSIKNNVQARKIAKEIEEYLIDLDDEVFFSRKTKRKTNRQLYNETIYGIAAKTDEDGITNYYKKEKLSILDDKDIYLRLLREREKFVINQSNPEVIDQIIEIIESYGKENNIPSRDEAINIKYTKNKINYNLYLKQYMRSLTKSLDQFSEEFINQMIANKTFVLYNPTKNTTRKIKFLRLVNDVKINDIRKNQVINKFNGKNNEPKAFYENINSLGAIVFKNSANNFKTLSINTQIAIFGDKNWDIEDFKTYNMEKIEKYKEIYGIDKTYNFHSFIFPGTILLDKQNKEFYYISSIQTVRDIIEIKFLNKIEFKDENKNQDTSKTPKRLMFGIKSIMNNYEQVDISPFGINKKIFE

SEQ ID NO: 321 - protein, 1239 aa, Mycoplasma cynos
MEEKRKVTLGFDLGVASVGWAIVDSETNEVYKLGSRLFDIPDTNIDRRAKRGSRRLVRRRSYRNQKFYNLIKRTKTFGFLDKEAIEKEFVLLSIKYPNIIELKVKGLQEEVSKSEAVWILHDYLKNRGYFYDDKEEKDDLENPSIESMPSYKLYEFYKEYGYFKGALSSPTESEKNKDSDLEKAIFFNFSNKEWTKEINHFFKIQKNIFSEDFKAKFMEFFSFIRDISKGPGSENMPSQYSIFGKYGDDGMGGKYQHIWDKNIGKCSIFKDKVRAPKYLPSALFFNLLNELSNIRLYSVDKREKSVLWRLSSKDKINIILNILQIILFKNDGKISNLDINKIVKNESIKSIILNEIDLDLIKDMWFEKEPNVYGIGLSGLNIEENKKENRFKFQDLKIFSVFIDLLKKSNINIEFNNEKDIIHNLKLLDELYFFLITQKYSRDKYGSIKKFILNNKSFNIDNLDEKLNIFLSISDDEFDNHNSKTHSLSKEAIYFIFPKLLHNNEGWNLEAIKNYDIDVREEISKHSFGIKKQDKKYLDDAFLDDAILPPSVKVTIKQSILIFNKIIKKFSNKFQIDNVVIELAREMTQEKEMDAQKSLNRLKKSRKKIIEERLNANNIDSKMFRDKTGEISPNYIYKIYLWISQNFKDPYTGENISANDILKNNVEIDHIIPYSLCFDDSSSNKVLVFKHSNQSKGNFLPFDMISTFSENSVWNWKEYTQYVEKTFKTNLESILDKKERVKKADNLLTSSYDGYDKLGFLARNLNDTRYATILFRDQLINYSENHLIDSKKMFKVIAMNGGVTSFIRKNMSFDSGLKVKDRSIFSHHAYDAAIIALFSNKTKILYNLINPSLDGIISKRSEGYWVLEDRLTGEIRKLNYNDWQSIKNNVEVKKIAREIESHLSNLDNVVMFSRKSKRKTNKELYNETLYGIATRIDENGIKNYYKKEKFNILEDENIYLRLLNERENFIINRSNPEVIDAIIEIFETIDKNKIPARDVAKNIKYTDNKIKYNLYLKDYMRKLVDEFPDKFRKDFIEQMIAKKIFILFNPIKNTTRKIKSLRSINNNKIEDIRKKQVLEKFNTAKNEPRSFYESLNSLGAIIFKNNLNIYKKMSISSQIATFGDKNWKIDDINTYNKEKLNKYKEIYGIDETYDFYSFIFPGTILLDEKNKEFLYISSIQTLKDKIELKFLDRIEFEKKNVNSNLKPKIKREIISTKKLMSDYKIIKISPLGINKKIFE

SEQ ID NO: 322 - protein, 1269 aa, Mycoplasma gallisepticum
MNNSIKSKPEVTIGLDLGVGSVGWAIVDNETNIIHHLGSRLFSQAKTAEDRRSFRGARRLIRRRKYKLKRFINLIWKYNSYFGFKNKEDILNNYQEQQKLHNTVLNLKLEALNAKIDPKALSWILHDYLKNRGHFYEDNRDFNVYPTEELANYFGEYGYYKGIIDSKEDNDDKLEEGLTKYKFSNQHWLEEIKKVLSNQTGLPEKFKEEYESLFSYVRNYSEGPGSINSVSPYGIYHLDEKEGKVVQKYNNIWDKTIGKCSIFPDEYRAPKNSPIAMIFNEINELSTIRSYSIYLTGWFINQEFKKAYLNKLLDLLIKTNSEKPIDARQFKKLREETIAESIGKETLKDVEREEKLEKEDHKWKLKGLKLNTNGKIQYNDLSSLAKFVHKLKQHLKLDFLLEDQYTTLDKINFLQSLFVYLGKHLRYSNRVDSANLKEFSDSNKLFERVLQEQKDDLFKLFEQTDKDDEKILAQTHSLSTKAMLLAITRMTNLDNDEDNQKNNDKGWNFEAIKNFDQKFIDITKKNNNLSLKQDKRYLDDRFINDAILSPGVKRILREATKVFNAILKQFSEEYDVTKVVIELARELSEEKELENTKNYEKLIKKNSDKISERLEALDIAEDKIEDILKSPTKSYKVLLWLQQDHIDPYSQKEIAFEDILTKTEKTEIDHIIPYSISFDDSSSNKLLVLAESNQAKSNQTPYEFITSGNAGIKWEDYEAYCRKFKDGDTSLLDSTQRSKKFAKMMKTDTSSKYDIGFLARNLNDTRYATIVFRDALKDYANNHLVEDKPMFKVVCINGGVTSFLRKNFDKSWYAKKDRDKNIHHAVDASIISIFSNETKTLFNQLTQFADYKLFKNTDGSWKKIDPKTGVVTEVTDENWKQIRVRNQVSEIAKVINKCIQDSNIERKARYSRKIENKTNISLFNDTVYSAKKVGYEDQIKRKNLKTLDIHESAEENKNSKVKKQFVYRKLVNVSLLNNDKLADLFAEKEDILMYRANPWVINLAEQIFNEYTENKKIKSQNVFEKYMLDLTKEFPEKFSEAFVKSMLRNKTAIIYNVEKKVVHRIKRLKILSSELKENKLSNVIIRSKNESGTKLSYQDTINSIALMIMRSIDPTAKKQYIRVPLNTLNLHLGDQDFDLHNIDAYLKKPKFVKYLKANEIGDEYKPWRVLTSGTLLIHKKDKKLMYISSFQNLKDVIEIKNLIETEYKENDDSDPKKKKKANRFLMTLSTILNDYILLDAKDNFDILGLSKNRIDEILNSKLGLDKITK

SEQ ID NO: 323 - protein, 1224 aa, Mycoplasma gallisepticum
MNNSIKSKPEVTIGLDLGVGSVGWAIVDNETNIIHHLGSRLFSQAKTAEDRRSFRGARRLIRRRKYKLKRFINLIWKYNSYFGFKNKEDILNNYQEQQKLHNTVLNLKLEALNAKIDPKALSWILHDYLKNRGHFYEDNRDFNVYPTEELANYFGEYGYYKGIIDSKEDNDDKLEEGLTKYKFSNQHWLEEIKKVLSNQTGLPEKFKEEYESLFSYVRNYSEGPGSINSVSPYGIYHLDEKEGKVVQKYNNIWDKTIGKCSIFPDEYRAPKNSPIAMIFNEINELSTIRSYSIYLTGWFINQEFKKAYLNKLLDLLIKTNSEKPIDARQFKKLREETIAESIGKETLKDVEREEKLEKEDHKWKLKGLKLNTNGKIQYNDLSSLAKFVHKLKQHLKLDFLLEDQYTTLDKINFLQSLFVYLGKHLRYSNRVDSANLKEFSDSNKLFERVLQEQKDDLFKLFEQTDKDDEKILAQTHSLSTKAMLLAITRMTNLDNDEDNQKNNDKGWNFEAIKNFDQKFIDITKKNNNLSLKQDKRYLDDRFINDAILSPGVKRILREATKVFNAILKQFSEEYDVTKVVIELARELSEEKELENTKNYEKLIKKNSDKISERLEALDIAEDKIEDILKSPTKSYKVLLWLQQDHIDPYSQKEIAFEDILTKTEKTEIDHIIPYSISFDDSSSNKLLVLAESNQAKSNQTPYEFITSGNAGIKWEDYEAYCRKFKDGDTSLLDSTQRSKKFAKMMKTDTSSKYDIGFLARNLNDTRYATIVFRDALKDYANNHLVEDKPMFKVVCINGGVTSFLRKNFDKSWYAKKDRDKNIHHAVDASIISIFSNETKTLFNQLTQFADYKLFKNTDGSWKKIDPKTGVVTEVTDENWKQIRVRNQVSEIAKVINKCIQDSNIERKARYSRKIENKTNISLFNDTVYSAKKVGYEDQIKRKNLKTLDIHESAEENKNSKVKKQFVYRKLVNVSLLNNDKLADLFAEKEDILMYRANPWVINLAEQIFNEYTENKKIKSQNVFEKYMLDLTKEFPEKFSEAFVKSMLRNKTAIIYNVEKKVVHRIKRLKILSSELKENKLSNVIIRSKNESGTKLSYQDTINSIALMIMRSIDPTAKKQYIRVPLNTLNLHLGDQDFDLHNIDAYLKKPKFVKYLKANEIGDEYKPWRVLTSGTLLIHKKDKKLMYISSFQNLKDVIEIKNLIETEYKENDDSDPKKRRKQIGS

SEQ ID NO: 324 - protein, 1269 aa, Mycoplasma gallisepticum
MNNSIKSKPEVTIGLDLGVGSVGWAIVDNETNIIHHLGSRLFSQAKTAEDRRSFRGVRRLIRRRKYKLKRFVNLIWKYNSYFGFKNKEDILNNYQEQQKLHNTVLNLKSEALNAKIDPKALSWILHDYLKNRGHFYEDNRDFNVYPTKELAKYFDKYGYYKGIIDSKEDNDNKLEEELTKYKFSNKHWLEEVKKVLSNQTGLPEKFKEEYESLFSYVRNYSEGPGSINSVSPYGIYHLDEKEGKVVQKYNNIWDKTIGKCNIFPDEYRAPKNSPIAMIFNEINELSTIRSYSIYLTGWFINQEFKKAYLNKLLDLLIKTNGEKPIDARQFKKLREETIAESIGKETLKDVENEEKLEKEDHKWKLKGLKLNTNGKIQYNDLSSLAKFVHKLKQHLKLDFLLEDQYATLDKINFLQSLFVYLGKHLRYSNRVDSANLKEFSDSNKLFERILQKQKDGLFKLFEQTDKDDEKILAQTHSLSTKAMLLAITRMTNLDNDEDNQKNNDKGWNFEAIKNFDQKFIDITKKNNNLSLKQNKRYLDDRFINDAILSPGVKRILREATKVFNAILKQFSEEYDVTKVVIELARELSEEKELENTKNYKKLIKKNGDKISEGLKALGISEDEIKDILKSPTKSYKFLLWLQQDHIDPYSLKEIAFDDIFTKTEKFEIDHIIPYSISFDDSSSNKLLVLAESNQAKSNQTPYEFISSGNAGIKWEDYEAYCRKFKDGDSSLLDSTQRSKKFAKMMKTDTSSKYDIGFLARNLNDTRYATIVFRDALEDYANNHLVEDKPMFKVVCINGSVTSFLRKNFDDSSYAKKDRDKNIHHAVDASIISIFSNETKTLFNQLTQFADYKLFKNTDGSWKKIDPKTGVVTEVTDENWKQIRVRNQVSEIAKVIEKYIQDSNIERKARYSRKIENKTNISLFNDTVYSAKKVGYEDQIKRKNLKTLDIHESAKENKNSKVKRQFVYRKLVNVSLLNNDKLADLFAEKEDILMYRANPWVINLAEQIFNEYTENKKIKSQNVFEKYMLDLTKEFPEKFSEFLVKSMLRNKTAIIYDDKKNIVHRIKRLKMLSSELKENKLSNVIIRSKNQSGTKLSYQDTINSLALMIMRSIDPTAKKQYIRVPLNTLNLHLGDHDFDLHNMDAYLKKPKFVKYLKANEIGDEYKPWRVLTSGTLLIHKKDKKLMYISSFQNLNDVIEIKNLIETEYKENDDSDSKKKKKANRFLMTLSTILNDYILLDAKDNFDILGLSKNRIDEILNSKLGLDKIVK

SEQ ID NO: 325 - protein, 1269 aa, Mycoplasma gallisepticum; identical to SEQ ID NO: 324
  source 1..1269: note = str. F

SEQ ID NO: 326 - protein, 1270 aa, Mycoplasma gallisepticum
MNNSIKSKPEVTIGLDLGVGSVGWAIVDNETNIIHHLGSRLFSQAKTAEDRRSFRGVRRLIRRRKYKLKRFVNLIWKYNSYFGFKNKEDILNNYQEQQKLHNTVLNLKLEALNAKIDPKALSWILHDYLKNRGHFYEDNRDFNVYPTEELANYFDEFGYYKGIIDSKNDDDDKLEEGLTKYKFSNQHWLEEVKKVLSNQTGLPEKFKEEYESLFSYVRNYSEGPGSINSVSPYGIYHLDEKEGKVVQKYNNIWDKTIGKCSIFPDEYRAPKNSPIAMIFNEINELSTIRSYSIYLTGWFINQEFKKAYLNKLLDLLIKTNSEKPIDARQFKKLREETIAESIGKETLKDVESEEKLEKDDHKWKLKGLKLNTNGKIQYNDLSSLAKFVHKLKQHLKLDFLLEDQYTPLDKINFLQSLYVYLGKHLRYSNRVDSANLKEFSDSSRLFERVLQEQKDGLFKLFEQTDKDDEKILTQTHSLSTKAMLLAITRMTNLDNDEDNQKNNDKGWNFEAIKNFDQKFIDITKTNNNLSLKQDKRYLDDQFINDAILSPGVKRILREATKVFNAILKQFSEEYDVTKVVIELARELSEEKELENTKNYKKLIKKNGDKISEGLKALGIAEDKIEEILKSPTKSYKVLLWLQQDHIDPYSQKEIAFDDILTKTEKTEIDHIIPYSISFDDSSSNKLLVLAESNQAKSNQTPYEFINSGKAEITWEVYEAYCHKFKNGDSSLLDSTQRSKKFAKMMKTDTSSKYDIGFLARNLNDTRYATIVFRDALKDYANNHLVEDKPMFKVVCINGGVTSFLRKNFDPKSWYAKKDRDKNIHHAVDASIISIFSNETKTLFNQLTKFADYKLFKNTDGSWKKIDPKTGVVSEVTDENWKQIRVRNQVSEIAKVIDKYIQDSNIERKARYSRKIENKTNISLFNDTVYSAKKVGYEDQIKRKNLKTLDIHESAEENKNSKVKKQFVYRKLVNVSLLNNDKLADLFAEKEDILMYRANPWVINLAEQIFNEYTENKKIKSQNVFEKYMLDLTKEFPEKFSEAFVKSMIRNKTAIIYNVEKDVVHRIKRLKILSSELKENKWSNVIIRSKNESGTKLSYQDTINSIALMIMRSIDPTAKKQYIRVPLNTLNLHLGDQDFDLHNIDAYLKKPKFVKYLKANEIGDEYKPWRVLTSGTLLIHKKDKKLMYISSFQNLNDLIEIKNLIETEYKENVDSDPKKKKKASQILRSLSVILNDYILLDAKYNFDILGLSKNKIDEILNSKLDLDKIAK

SEQ ID NO: 327 - protein, 1236 aa, Mycoplasma mobile
MYFYKNKENKLNKKVVLGLDLGIASVGWCLTDISQKEDNKFPIILHGVRLFETVDDSDDKLLNETRRKKRGQRRRNRRLFTRKRDFIKYLIDNNIIELEFDKNPKILVRNFIEKYINPFSKNLELKYKSVTNLPIGFHNLRKAAINEKYKLDKSELIVLLYFYLSLRGAFFDNPEDTKSKEMNKNEIEIFDKNESIKNAEFPIDKIIEFYKISGKIRSTINLKFGHQDYLKEIKQVFEKQNIDFMNYEKFAMEEKSFFSRIRNYSEGPGNEKSFSKYGLYANENGNPELIINEKGQKIYTKIFKTLWESKIGKCSYDKKLYRAPKNSFSAKVFDITNKLTDWKHKNEYISERLKRKILLSRFLNKDSKSAVEKILKEENIKFENLSEIAYNKDDNKINLPIINAYHSLTTIFKKHLINFENYLISNENDLSKLMSFYKQQSEKLFVPNEKGSYEINQNNNVLHIFDAISNILNKFSTIQDRIRILEGYFEFSNLKKDVKSSEIYSEIAKLREFSGTSSLSFGAYYKFIPNLISEGSKNYSTISYEEKALQNQKNNFSHSNLFEKTWVEDLIASPTVKRSLRQTMNLLKEIFKYSEKNNLEIEKIVVEVTRSSNNKHERKKIEGINKYRKEKYEELKKVYDLPNENTTLLKKLWLLRQQQGYDAYSLRKIEANDVINKPWNYDIDHIVPRSISFDDSFSNLVIVNKLDNAKKSNDLSAKQFIEKIYGIEKLKEAKENWGNWYLRNANGKAFNDKGKFIKLYTIDNLDEFDNSDFINRNLSDTSYITNALVNHLTFSNSKYKYSVVSVNGKQTSNLRNQIAFVGIKNNKETEREWKRPEGFKSINSNDFLIREEGKNDVKDDVLIKDRSFNGHHAEDAYFITIISQYFRSFKRIERLNVNYRKETRELDDLEKNNIKFKEKASFDNFLLINALDELNEKLNQMRFSRMVITKKNTQLFNETLYSGKYDKGKNTIKKVEKLNLLDNRTDKIKKIEEFFDEDKLKENELTKLHIFNHDKNLYETLKIIWNEVKIEIKNKNLNEKNYFKYFVNKKLQEGKISFNEWVPILDNDFKIIRKIRYIKFSSEEKETDEIIFSQSNFLKIDQRQNFSFHNTLYWVQIWVYKNQKDQYCFISIDARNSKFEKDEIKINYEKLKTQKEKLQIINEEPILKINKGDLFENEEKELFYIVGRDEKPQKLEIKYILGKKIKDQKQIQKPVKKYFPNWKKVNLTYMGEIFKK

SEQ ID NO: 328 - protein, 1265 aa, Mycoplasma ovipneumoniae
  source 1..1265: note = SC01
MHNKKNITIGFDLGIASIGWAIIDSTTSKILDWGTRTFEERKTANERRAFRSTRRNIRRKAYRNQRFINLILKYKDLFELKNISDIQRANKKDTENYEKIISFFTEIYKKCAAKHSNILEVKVKALDSKIEKLDLIWILHDYLENRGFFYDLEEENVADKYEGIEHPSILLYDFFKKNGFFKSNSSIPKDLGGYSFSNLQWVNEIKKLFEVQEINPEFSEKFLNLFTSVRDYAKGPGSEHSASEYGIFQKDEKGKVFKKYDNIWDKTIGKCSFFVEENRSPVNYPSYEIFNLLNQLINLSTDLKTTNKKIWQLSSNDRNELLDELLKVKEKAKIISISLKKNEIKKIILKDFGFEKSDIDDQDTIEGRKIIKEEPTTKLEVTKHLLATIYSHSSDSNWININNILEFLPYLDAICIILDREKSRGQDEVLKKLTEKNIFEVLKIDREKQLDFVKSIFSNTKFNFKKIGNFSLKAIREFLPKMFEQNKNSEYLKWKDEEIRRKWEEQKSKLGKTDKKTKYLNPRIFQDEIISPGTKNTFEQAVLVLNQIIKKYSKENIIDAIIIESPREKNDKKTIEEIKKRNKKGKGKTLEKLFQILNLENKGYKLSDLETKPAKLLDRLRFYHQQDGIDLYTLDKINIDQLINGSQKYEIEHIIPYSMSYDNSQANKILTEKAENLKKGKLIASEYIKRNGDEFYNKYYEKAKELFINKYKKNKKLDSYVDLDEDSAKNRFRFLTLQDYDEFQVEFLARNLNDTRYSTKLFYHALVEHFENNEFFTYIDENSSKHKVKISTIKGHVTKYFRAKPVQKNNGPNENLNNNKPEKIEKNRENNEHHAVDAAIVAIIGNKNPQIANLLTLADNKTDKKFLLHDENYKENIETGELVKIPKFEVDKLAKVEDLKKIIQEKYEEAKKHTAIKFSRKTRTILNGGLSDETLYGFKYDEKEDKYFKIIKKKLVTSKNEELKKYFENPFGKKADGKSEYTVLMAQSHLSEFNKLKEIFEKYNGFSNKTGNAFVEYMNDLALKEPTLKAEIESAKSVEKLLYYNFKPSDQFTYHDNINNKSFKRFYKNIRIIEYKSIPIKFKILSKHDGGKSFKDTLFSLYSLVYKVYENGKESYKSIPVTSQMRNFGIDEFDFLDENLYNKEKLDIYKSDFAKPIPVNCKPVFVLKKGSILKKKSLDIDDFKETKETEEGNYYFISTISKRFNRDTAYGLKPLKLSVVKPVAEPSTNPIFKEYIPIHLDELGNEYPVKIKEHTDDEKLMCTIK

SEQ ID NO: 329 - protein, 1314 aa, Mycoplasma synoviae
MLRLYCANNLVLNNVQNLWKYLLLLIFDKKIIFLFKIKVILIRRYMENNNKEKIVIGFDLGVASVGWSIVNAETKEVIDLGVRLFSEPEKADYRRAKRTTRRLLRRKKFKREKFHKLILKNAEIFGLQSRNEILNVYKDQSSKYRNILKLKINALKEEIKPSELVWILRDYLQNRGYFYKNEKLTDEFVSNSFPSKKLHEHYEKYGFFRGSVKLDNKLDNKKDKAKEKDEEEESDAKKESEELIFSNKQWINEIVKVFENQSYLTESFKEEYLKLFNYVRPFNKGPGSKNSRTAYGVFSTDIDPETNKFKDYSNIWDKTIGKCSLFEEEIRAPKNLPSALIFNLQNEICTIKNEFTEFKNWWLNAEQKSEILKFVFTELFNWKDKKYSDKKFNKNLQDKIKKYLLNFALENFNLNEEILKNRDLENDTVLGLKGVKYYEKSNATADAALEFSSLKPLYVFIKFLKEKKLDLNYLLGLENTEILYFLDSIYLAISYSSDLKERNEWFKKLLKELYPKIKNNNLEIIENVEDIFEITDQEKFESFSKTHSLSREAFNHIIPLLLSNNEGKNYESLKHSNEELKKRTEKAELKAQQNQKYLKDNFLKEALVPLSVKTSVLQAIKIFNQIIKNFGKKYEISQVVIEMARELTKPNLEKLLNNATNSNIKILKEKLDQTEKFDDFTKKKFIDKIENSVVFRNKLFLWFEQDRKDPYTQLDIKINEIEDETEIDHVIPYSKSADDSWFNKLLVKKSTNQLKKNKTVWEYYQNESDPEAKWNKFVAWAKRIYLVQKSDKESKDNSEKNSIFKNKKPNLKFKNITKKLFDPYKDLGFLARNLNDTRYATKVFRDQLNNYSKHHSKDDENKLFKVVCMNGSITSFLRKSMWRKNEEQVYRFNFWKKDRDQFFHHAVDASIIAIFSLLTKTLYNKLRVYESYDVQRREDGVYLINKETGEVKKADKDYWKDQHNFLKIRENAIEIKNVLNNVDFQNQVRYSRKANTKLNTQLFNETLYGVKEFENNFYKLEKVNLFSRKDLRKFILEDLNEESEKNKKNENGSRKRILTEKYIVDEILQILENEEFKDSKSDINALNKYMDSLPSKFSEFFSQDFINKCKKENSLILTFDAIKHNDPKKVIKIKNLKFFREDATLKNKQAVHKDSKNQIKSFYESYKCVGFIWLKNKNDLEESIFVPINSRVIHFGDKDKDIFDFDSYNKEKLLNEINLKRPENKKFNSINEIEFVKFVKPGALLLNFENQQIYYISTLESSSLRAKIKLLNKMDKGKAVSMKKITNPDEYKIIEHVNPLGINLNWTKKLENNN

SEQ ID NO: 330 - protein, 1304 aa, Mycoplasma synoviae
  source 1..1304: note = 53
MLNNVQNLWKYLLLLIFDKKIIFLFKIKVILIRRYMENNNKEKIVIGFDLGVASVGWSIVNAETKEVIDLGVRLFSEPEKADYRRAKRTTRRLLRRKKFKREKFHKLILKNAEIFGLQSRNEILNVYKDQSSKYRNILKLKINALKEEIKPSELVWILRDYLQNRGYFYKNEKLTDEFVSNSFPSKKLHEHYEKYGFFRGSVKLDNKLDNKKDKAKEKDEEEESDAKKESEELIFSNKQWINEIVKVFENQSYLTESFKEEYLKLFNYVRPFNKGPGSKNSRTAYGVFSTDIDPETNKFKDYSNIWDKTIGKCSLFEEEIRAPKNLPSALIFNLQNEICTIKNEFTEFKNWWLNAEQKSEILKFVFTELFNWKDKKYSDKKFNKNLQDKIKKYLLNFALENFNLNEEILKNRDLENDTVLGLKGVKYYEKSNATADAALEFSSLKPLYVFIKFLKEKKLDLNYLLGLENTEILYFLDSIYLAISYSSDLKERNEWFKKLLKELYPKIKNNNLEIIENVEDIFEITDQEKFESFSKTHSLSREAFNHIIPLLLSNNEGKNYESLKHSNEELKKRTEKAELKAQQNQKYLKDNFLKEALVPLSVKTSVLQAIKIFNQIIKNFGKKYEISQVVIEMARELTKPNLEKLLNNATNSNIKILKEKLDQTEKFDDFTKKKFIDKIENSVVFRNKLFLWFEQDRKDPYTQLDIKINEIEDETEIDHVIPYSKSADDSWFNKLLVKKSTNQLKKNKTVWEYYQNESDPEAKWNKFVAWAKRIYLVQKSDKESKDNSEKNSIFKNKKPNLKFKNITKKLFDPYKDLGFLARNLNDTRYATKVFRDQLNNYSKHHSKDDENKLFKVVCMNGSITSFLRKSMWRKNEEQVYRFNFWKKDRDQFFHHAVDASIIAIFSLLTKTLYNKLRVYESYDVQRREDGVYLINKETGEVKKADKDYWKDQHNFLKIRENAIEIKNVLNNVDFQNQVRYSRKANTKLNTQLFNETLYGVKEFENNFYKLEKVNLFSRKDLRKFILEDLNEESEKNKKNENGSRKRILTEKYIVDEILQILENEEFKDSKSDINALNKYMDSLPSKFSEFFSQDFINKCKKENSLILTFDAIKHNDPKKVIKIKNLKFFREDATLKNKQAVHKDSKNQIKSFYESYKCVGFIWLKNKNDLEESIFVPINSRVIHFGDKDKDIFDFDSYNKEKLLNEINLKRPENKKFNSINEIEFVKFVKPGALLLNFENQQIYYISTLESSSLRAKIKLLNKMDKGKAVSMKKITNPDEYKIIEHVNPLGINLNWTKKLENNN

SEQ ID NO: 331 - protein, 1401 aa, Myroides injenensis
  source 1..1401: note = M09-0166
MKRILGLDLGTTSIGWAYVHEAENVNETSSIQKVGVRVNPLTTEEQTNFEKGKPITTNASRTLARSARRNLQRYKLRRDNLIQILKENNWINNTTSLTETGNHSTFETYELRNKAASEKLTLDQLSRVLLMLNKKRGYKSSRKVNSKEEGQLIDGMEVAKKLYHEQLTPGQLSLQLMNQGVKKLPDYYRSDLNQELESIWNFQQQFYPNILTDKFKEEINGKGLTSTSSAFWNIYNFNTAENKGSRDEKKKQALQWRSEALSKQLSKEIVAYIIADLNGQIYNSSGYLGAISDRSKELYFNNLTVGQYLFKQLKSNPHTSLKNQVFYRQDYLNEFEKIWETQSKFYPKELTAALKREIRDVIIFYQRKLKSQKGLISFCEFEQKQKTINGKTKTIGHRVIPKSSPLFQEFKIWQQLHNVVLRNKKTNEIVSLADEQKVHLFEELNLKGKLKSNQVLKLIENKPKDWELNYTELEGNNTNKALYNAYLDILDIEGYDVRNELKVKLNKDDIELSDLDVNASEIKEMIFSVFKHLGINTEILEFDATLEDKVFEKQASYQLWHLLYSYEEDNSPTGLDRLYNLLHKKFGFKLNHAKLIGNVLFQDDYGSLSSKAIKNIFPYITENNYYTACELAGYKHSKHSLTKEENETRELKNRLTILPKNSLRNPVVEKIINQMINVVNTLIDEENNILIAQGKEPNFQFDEIRIELARELKKNAKEREELTKSINKSKTDHEKIIKILQKEDGIKNPTRNDIVRFKLYSELKNNGYKDLYTNEYIERKDIFTKEYDIEHIIPQSKLFDDSFSNKTLVRRNVNLKKGNQTAYDFILCEYGQEKANEFETRITNLYNLGKDEGISKSKFKKLLMQESEIGNGFIERDLRETQYIAKKAKSLLLEITRNVISTSGSITDRLREDWGLINVMKELNLQKYRDAGLTEFVKMKDGNKKEVIIDWTKRNDHRHHAMDALTIAFTKHNHIQYLNHLNARKNVNNELHNNIIAIEKLETTLVSDERGNKKRIFKEPIANFRTIAKSHLEAILVSHKAKNKVVTKNINKISGKKISQQTLTPRGQLHKETIYGKIRQYVSKQEKVGPKFTIEVIEQVSNPTYRNLLLKRLEENNNDPKKAFGGKNSLNKNPIYINLEKNIKVPEVLKLVWLEDNYTIRKEISPDLKIDKVIDQGVKQILQNRLAQYKGDSKLAFSNLDANPIWLNEDKGIAIKRVTISGIATAQPLHRKKDHLGQPILDHNGQEIPVDFISTGNNHHVAIYEDENGKLQESVVSHFEAVERVNQKLPIIDKTFNQHLGWKFLFTMKQNELFLFPSDDFNPNEIDLFDKQNYTVISKHLFRIQKLSTKDYSFRHHLETNVEEIKDLKTITWRREGLNGIQNIIKVRTNHLGEIIHIGEY

SEQ ID NO: 332 - protein, 1466 aa, Myroides odoratus
  source 1..1466: note = DSM 2801
MKNILGLDLGTNSIGWALVKEDFENKQGEILGLGSRIIPMSQDILGEFGRGNSISQTADRTGYRGVRRLRERHLLRRERLHRVLNILGFLPNHYAKEIDFTKRLGKFINHAEPKLSFDKEFIFKDSFNEMLKDFQQNQPGFIINKHGEEALVPYDWTIYYLRKKALTQKIDKEELAWILLNFNQKRGYYQLRGEEEEENTNKLVEFYSLKIIDVIADNEVNKKGEVWYSLHLENGWIYRRSSKISLVDWKDKVRDFIVTTDVNDDGSEKLDKDGVVKRSFRAPSADDWTLLKKKTEQDIDNSNKTVGAYIYENLLLNPKQKIKGKLVRTIERKFYKDELKQILEKQKEFHQELQNEQLLQDCVRELYKYNEQHQQMLESKDFVHLFLNDIIFYQRPLRSQKSLISNCTLEKRVSRDGVVFPIKVISKSNPYYQEFRLLQWLQNLAIYRKDDDVNVTQEFLNSIESWENLLQFLNAKKEIKQEQLIKFLLEQKGLKGNSLKTAILTYRWNYVTDKVYPMNETRSLIQDKLKKVENVATDFLSFDNEMALWHIIYSVNDKIEYEKALAKFASKHNLDEISFVESFKKFPPFKSDYGSFSEKAIKKLLPLMRFGSVWNKNNIVPSVLDRIDKILTGEYDEKIKIRVREKAEQFQLNQIEDFQNLPLWLAQYVVYDRHSEAEIAGKWNSVKDLENYLKEFKQHSLRNPIVEQIITETLRVVKDIWQQYGNGVQNFFDEIHIELGREMKNTADERKRITNSVTENENTNLRIKALLVELKEDTNIENVRPHSPMQQEILKIYEEGVLNAVENIDEDILKISKTAQPSKSELIRYKLWLEQKYQSPYTGEMIPLSRLFTSDYEIEHVIPQSRYFDDSLSNKVICEAAVNKRKDNQLGLEFIKNHHSEKIELGNGRTAQVLEVEAYESFVKKNYDKNRGKRNKLLLEDVPEKMIERQLNDTRYISKFVTHLLSNIVRKDEVNSKDDGINSKNIIPGNGKITSQLKQDWGLNDVWNELILPRFERMNNLTNSTDFTSTNTNGKIIPTVPLEYSKGFSKKRIDHRHHALDALVIALATRDHVNLLNNESALPKKDRTKEEQKSFRFDLQVNLRNKEKYFNVKEGREKEKFTTFKKPWNTLTQDTRDALENMVVSFKQNLRVINKATNYYESYTDENGNLRLDKYGNPKKELISQKGTNWAIRKSLHKETVSGQIHLDRVKVTKGKIVTATRKSLDSSFNEKSIESITDTGIQKILRNYLKAKDNKPDVAFSPEGIEELNKSISVYNEGKNHQPIIKVRIFEQGSKFPVGETGNKIAKFVEAAKGTNLFFGIYQDKTGKRSYDTIPLNLVIERLKQGLSPVPETNEKGHQLLFHLSPNDLVYVPTIDDNEQLDSNRVYKFTDSSDTTCNFIPSNISAIIFNINSKEQEKRGINYPIQNELGVGSPQSKNQKSFDGFMIKEVCIKLKVDRLGNISKT

SEQ ID NO: 333 - protein, 1077 aa, Neisseria bacilliformis
  source 1..1077: note = ATCC BAA-1200
MQQKPQRYILGLDLGIASVGWACVWADENEHPTGLLDCGVRTFERAEVPKTGDSLALARRQARSVRRLIRRRAHRLLRLRRLLKREGVLLSADFNENGLVRGLPIDAWALRVAGLDRKLSNKEWAAVLLHLVKHRGYLSQRKNETQSKDKELGRLLAGVNGNREALQNRSDEYRTAAELAVKKFAAENNGSLRNKGGDYSHTFDRKDLQRELHLLFERQRALDNPFTSSEMEAAVDELLMKQRSALQGEAVLKMLGRCTFEPSEYKAAKNTYSAERFVWLTKLNNLRIQYNGEERALSEAERRLLLDEPYQKAKLTYKQVRTILELPESAVFKGLRYGHGEDGLKAESGTLMEMKAYHAVRKALKDAGLEGEWENRIRNPELLDAIGTAFSLYKTDEDIRANLAAFRLSENVLEALLAGLNFDKFVHLSLKALAKILPLMEQGMRYDEACKEAYGDHYGAKEQEDHRLLPPFVADDIRNPVVFRTLTQARKIVNEIVRRYGSPLRVHIETGREVGKSFSDRKEIEKRQEENRKERERAAAHFKELFPNFAGEPKAQDILKLRLYEQQHGKCLYSGKEIDLRRLPEKGYVEIDHALPFSRTWDDSFNNKVLVLGKENQDKRNRTPYEYLDGKGNSGAWRAFAERVSGCRFPYAKKQRLLTQKLDEKTEQGFLERNLNDTRYVARFLCQFIEEKMHLEGAGKKRVFASNGQITALLRGFWGLKKVREENDRHHALDAVVVACSSVSMQQKITRHFRYREELEHIDRETGEVIHGFPQPWEFFRQEVMTRVFSDDPVSELAEKLDSRPEAVHEFVTPLFVSRAPHRKVTGQGHLETIRSAKRLDEKISVVKLPLTQLKTKDIERIVGYPNREPALYDALAARLAAFKDDPAKAFSEPFYKTGKDGKCGVLVKAVRVENVQKSGLLVRKDESGKMQGVADNATMVRVDVFGKNGKNYLVPVYAWQVEKGELPNRAVVAYADEEDWDEMDDSFEFKFSLYPNDLVEVVTKKDKFFGYYSGFNRATGAINIKEHDLSKSKVKNGVYEGIGVKTAQSFQKYQVDTLGKTIRLCKPEKRMGFKKK

SEQ ID NO: 334 - protein, 1082 aa, Neisseria cinerea
  source 1..1082: note = ATCC 14685
MAAFKPNPMNYILGLDIGIASVGWAIVEIDEEENPIRLIDLGVRVFERAEVPKTGDSLAAARRLARSVRRLTRRRAHRLLRARRLLKREGVLQAADFDENGLIKSLPNTPWQLRAAALDRKLTPLEWSAVLLHLIKHRGYLSQRKNEGETADKELGALLKGVADNTHALQTGDFRTPAELALNKFEKESGHIRNQRGDYSHTFNRKDLQAELNLLFEKQKEFGNPHVSDGLKEGIETLLMTQRPALSGDAVQKMLGHCTFEPTEPKAAKNTYTAERFVWLTKLNNLRILEQGSERPLTDTERATLMDEPYRKSKLTYAQARKLLDLDDTAFFKGLRYGKDNAEASTLMEMKAYHAISRALEKEGLKDKKSPLNLSPELQDEIGTAFSLFKTDEDITGRLKDRVQPEILEALLKHISFDKFVQISLKALRRIVPLMEQGNRYDEACTEIYGDHYGKKNTEEKIYLPPIPADEIRNPVVLRALSQARKVINGVVRRYGSPARIHIETAREVGKSFKDRKEIEKRQEENRKDREKSAAKFREYFPNFVGEPKSKDILKLRLYEQQHGKCLYSGKEINLGRLNEKGYVEIDHALPFSRTWDDSFNNKVLALGSENQNKGNQTPYEYFNGKDNSREWQEFKARVETSRFPRSKKQRILLQKFDEDGFKERNLNDTRYINRFLCQFVADHMLLTGKGKRRVFASNGQITNLLRGFWGLRKVRAENDRHHALDAVVVACSTIAMQQKITRFVRYKEMNAFDGKTIDKETGEVLHQKAHFPQPWEFFAQEVMIRVFGKPDGKPEFEEADTPEKLRTLLAEKLSSRPEAVHKYVTPLFISRAPNRKMSGQGHMETVKSAKRLDEGISVLRVPLTQLKLKDLEKMVNREREPKLYEALKARLEAHKDDPAKAFAEPFYKYDKAGNRTQQVKAVRVEQVQKTGVWVHNHNGIADNATIVRVDVFEKGGKYYLVPIYSWQVAKGILPDRAVVQGKDEEDWTVMDDSFEFKFVLYANDLIKLTAKKNEFLGYFVSLNRATGAIDIRTHDTDSTKGKNGIFQSVGVKTALSFQKYQIDELGKEIRPCRLKKRPPVR

SEQ ID NO: 335 - protein, 1081 aa, Neisseria flavescens
  source 1..1081: note = SK114
MTAFKPNPINYILGLDIGIASVGWAMVEIDEEENPIRLIDLGVRVFERAEVPKTGDSLAAARRLARSVRRLTRRRAHRLLRARRLLKREGVLQAADFDENGLIKSLPNTPWQLRAAALDRKLTPLEWSAVLLHLIKHRGYLSQRKNEGETADKELGALLKGVADNAHALQTGDFRTPAELAVNKFEKESGHIRNQRGDYSHTFSRKDLQAELVLLFEKQKEFGNPHISDGLKEGIETLLMAQRPALSGDAVQKMLGYCTFEPTEPKAAKNTYTAERFIWLTKLNNLRILEQGSERPLTDTERATLIDMPYKNKLTYAKARELLGLDDTAFFKGLRYGKDNAESATLMEMKAYHAIRRALEKEGLKDKKSPLSLSPELQDEIGTAFSLFKTDEDITGRLKGCLQPEILDALLKHINFDKFVQISLKALRRIVPLMEQGKRYDEACAETYGDHYGEKNSEEMLYLPPIPADEIRNPVVLRALSQARKVINGVVRRYGSPARIHIETAREVGKSFKDRKEIEKRQEENRKDREKAAAKFREYFPNFVGEPKSKDILKLRLYEQQHGKCLYSGKAIDIRRLNGKGYVEIDHALPFSRTWDDSFNNKVLVLGSENQNKGNRTPYEYLNGKDNSREWLEFKARVETSRFPHSKKQRVLLQKFDEKGFKERNLNDTRYVNRFLCQFVADHMQLTGKGKRRVFASNGQITNLLRGFWGLHKVRAENDRHHALDAVVVACSTVAMQQKITCFVRYKEMNAFDGKTVDKETGEVLHQKTHFPQPWEFFAQEVMIRVFGKPDGKPEFEEADTPEKLRALLAEKLSSRPEAVHEYVTPLFVSRAPNRKMSGAHKDTLRSAKRFVKHNEKISVKRVWLTEIKLADLENMVNYKNGREIELYEALKARLGAYGGNAKQAFDPKDNPFYKKGGQLVKAVRVEKTQESGVLLNKKNAYTIADNGDMVRVDVFCKVDKKGKNQYFIVPIYAWQVAENILPDIDCKGYRIDDSYTFCFSLHKYDLIAFQKDEKSKVEFAYYINCDSSNGRFYLAWHDKGSKEQQFRISTQNLVLMQKYQIDELGKEIRPCRLKKRPPVR

SEQ ID NO: 336 - protein, 1082 aa, Neisseria lactamica
MAAFKPNPMNYILGLDIGIASVGWAMVEIDKEENPIRLIDLGVRVFERAEVPKTGDSLAMARRLARSVRRLTRRRAHRLLRARRLLKREGVLQDADFDENGLVKSLPNTPWQLRAAALDRKLTCLEWSAVLLHLIKHRGYLSQRKNEGETADKELGALLKGVADNAHALQTGDFRTPAELALNKFEKESGHIRNQRGDYSHTFSRKDLQAELNLLFEKQKEFSNPHVSDSLKEGIETLLMAQRPALSGDAVQKMLGHCTFEPAEPKAAKNTYTAERFIWLTKLNNLRILEQGSERPLTDTERATLMDEPYRKSKLTYAQARKLLGLEDTAFFKGLRYGKDNAEAPTLMEMKAYHAISRALEKEGLKDKKSPLNLSTELQDEIGTAFSLFKTDKDITGRLKDRVQPEILEALLKHISFDKFVQISLKALRRIVPLMEQGKRYDEACAEIYGDHYCKKNAEEKIYLPPIPADEIRNPVVLRALSQARKVINCVVRRYGSPARIHIETAREVGKSFKDRKEIEKRQEENRKDREKAAAKFREYFPNFVGEPKSKDILKLRLYEQQHGKCLYSGKEINLVRLNEKGYVEIDHALPFSRTWDDSFNNKVLVLGSENQNKGNQTPYEYFNGKDNSREWQEFKARVETSRFPRSKKQRILLQKFDEEGFKERNLNDTRYVNRFLCQFVADHILLTGKGKRRVFASNGQITNLLRGFWGLRKVRAENDRHHALDAVVVACSTVAMQQKITRFVRYKEMNAFDGKTIDKETGEVLHQKAHFPQPWEFFAQEVMIRVFGKPDGKPEFEEADTPEKLRTLLAEKLSSRPEAVHEYVTPLFVSRAPNRKMSGQGHMETVKSAKRLDEGISVLRVPLTQLKLKGLEKMVNREREPKLYDALKAQLETHKDNPAKAFAEPFYKYDKAGNRTQQVKAVRIEQVQKTGVWVRNHNGIADNATMVRVDVFEKGGKYYLVPIYSWQVAKGILPDRAVVAFKDEEDWTVMDDSFEFRFVLYANDLIKLTAKKNEFLGYFVSLNRATGAIDIRTHDTDSTKGKNGIFQSVGVKTALSFQKNQIDELGKEIRPCRLKKRPPVR

SEQ ID NO: 337 - protein, 1082 aa, Neisseria meningitidis
MAAFKPNPINYILGLDIGIASVGWAMVEIDEDENPICLIDLGVRVFERAEVPKTGDSLAMARRLARSVRRLTRRRAHRLLRARRLLKREGVLQAADFDENGLIKSLPNTPWQLRAAALDRKLTPLEWSAVLLHLIKHRGYLSQRKNEGETADKELGALLKGVADNAHALQTGDFRTPAELALNKFEKESGHIRNQRGDYSHTFSRKDLQAELNLLFEKQKEFGNPHISDGLKEGIETLLMTQRPALSGDAVQKMLGHCTFEPAEPKAAKNTYTAERFIWLTKLNNLRILEQGSERPLTDTERTTLIDEPYRKSKLTYAQARKLLELDNTAFFKGLRYGKDNAEASTLMEMKAYHAISRALEKEGLKDKKSPLNLSPELQDEIGTAFSLFKTDEDITGRLKDRVQPEILEALLKHISFDKFVQISLKALRRIVPLMEQGKRYDEACAEIYGDHYGKKNTEEKIDLPPIPADEIRNPVVLRALSQARKVINGVVRRYGSPARIHIETAREVGKSFKDRKEIEKRQEENRKDREKAATKFREYFPNFVGEPKSKDILKLRLYEQQHGKCLYSGKEINLGRLNEKGYVEIDHALPFSRTWDDSFNNKVLVLGSENQNKGNQTPYEYFNGKDNSREWQEFKARVETSRFPRSKKQRILLQKFDEEGFKERNLNDTRYVNRFLCQFVADHMLLTGKGKRRVFASNGQITNLLRGFWGLRKVRAENDRHHALDAVVVACSTVAMQQKITRFVRYKEMNAFDGKTIDKETGEVLHQKTHFPQPWEFFAQEVMIRVFGKPDGKPEFEEADTPEKLRTLLAEKLSSRPEAVHEYVTPLFVSRAPNRKMSGQGHMETVKSAKRLDEGVSVLRVPLTQLKLKDLEKMVNREREPKLYEALKARLEAHKDDPAKAFAEPFYKYDKAGNRTQQVKAVRVEQVQKTGVWVRNHNGIADNATMVRVDVFEKGDKYYLVPIYSWQVAKGILPDRAVVQGKDEEDWQLIDDSFNFKFSLHPNDLVEVITKKARMFGYFASCHRGTGNINIRIHDLDHKIGKNGILEGIGVKTALSFQKYQIDELGKEIRPCRLKKRPPVR

SEQ ID NO: 338 - protein, 1082 aa, Neisseria meningitidis
  source 1..1082: note = 2007056
MAAFKPNPINYILGLDIGIASVGWAMVEIDEDENPICLIDLGVRVFERAEVPKTGDSLAMARRLARSVRRLTRRRAHRLLRARRLLKREGVLQAADFDENGLIKSLPNTPWQLRAAALDRKLTPLEWSAVLLHLIKHRGYLSQRKNEGETADKELGALLKGVADNAHALQTGDFRTPAELALNKFEKESGHIRNQRGDYSHTFSRKDLQAELILLFEKQKEFGNPHVSGGLKEGIETLLMTQRPALSGDAVQKMLGHCTFEPAEPKAAKNTYTAERFIWLTKLNNLRILEQGSERPLTDTERATLMDEPYRKSKLTYAQARKLLGLEDTAFFKGLRYGKDNAEASTLMEMKAYHAISRALEKEGLKDKKSPLNLSPELQDEIGTAFSLFKTDEDITGRLKDRIQPEILEALLKHISFDKFVQISLKALRRIVPLMEQGKRYDEACAEIYGDHYGKKNTEEKIYLPPIPADEIRNPVVLRALSQARKVINGVVRRYGSPARIHIETAREVGKSFKDRKEIEKRQEENRKDREKAAAKFREYFPNFVGEPKSKDILKLRLYEQQHGKCLYSGKEINLGRLNEKGYVEIDHALPFSRTWDDSFNNKVLVLGSENQNKGNQTPYEYFNGKDNSREWQEFKARVETSRFPRSKKQRILLQKFDEDGFKERNLNDTRYVNRFLCQFVADRMRLTGKGKKRVFASNGQITNLLRGFWGLRKVRAENDRHHALDAVVVACSTVAMQQKITRFVRYKEMNAFDGKTIDKETGEVLHQKTHFPQPWEFFAQEVMIRVFGKPDGKPEFEEADTPEKLRTLLAEKLSSRPEAVHEYVTPLFVSRAPNRKMSGQGHMETVKSAKRLDEGVSVLRVPLTQLKLKDLEKMVNREREPKLYEALKARLEAHKDDPAKAFAEPFYKYDKAGNRTQQVKAVRVEQVQKTGVWVRNHNGIADNATMVRVDVFEKGDKYYLVPIYSWQVAKGILPDRAVVQGKDEEDWQLIDDSFNFKFSLHPNDLVEVITKKARMFGYFASCHRGTGNINIRIHDLDHKIGKNGILEGIGVKTALSFQKYQIDELGEEIRPCRLKKRPPVR

SEQ ID NO: 339 - protein, 1082 aa, Neisseria meningitidis
  source 1..1082: note = 63049
MAAFKPNPINYILGLDIGIASVGWAMVEIDEEENPIRLIDLSVRVFERAEVPKTGDSLAMARRLARSVRRLTRRRAHRLLRARRLLKREGVLQAADFDENGLIKSLPNTPWQLRAAALDRKLTPLEWSAVLLHLIKHRGYLSQRKNEGETADKELGALLKGVADNAHALQTGDFRTPAELALNKFEKESGHIRNQRGDYSHTFSRKDLQAELILLFEKQKEFGNPHVSGGLKEGIETLLMTQRPALSGDAVQKMLGHCTFEPAEPKAAKNTYTAERFVWLTKLNNLRILEQGSERPLTDTERATLMDEPYRKSKLTYAQARKLLGLEDTAFFKGLRYGKDNAEASTLMEMKAYHAISRALEKEGLKDKKSPLRLSPELQDEIGTAFSLFKTDEDITGRLKDRVQPEILEALLKHISFDKFVQISLKALRRIVPLMEQGKRYDEACAEIYGDHYGKKNAEEKIYLPPIPADEIRNPVVLRALSQARKVINGVVRRYGSPARIHIETAREVGKSFKDRKEIEKRQEENRKDREKAAAKFREYFPNFVGEPKSKDILKLRLYEQQHGKCLYSGKEINLGRLNEKGYVEIDHALPFSRTWDDSFNNKVLVLGSENQNKGNQTPYEYFNGKDNSREWQEFKARVETSRFPRSKKQRILLQKFDEDGFKERNLNDTRYVNRFLCQFVADRMRLTGKGKKRVFASNGQITNLLRGFWGLRKVRAENDRHHALDAVVVACSTVAMQQKITRFVRYKEMNAFDGKTIDKETGEVLHQKTHFPQPWEFFAQEVMIRVFGKPDGKPEFEEADTPEKLRTLLAEKLSSRPEAVHEYVTPLFVSRAPNRKMSGQGHMETVKSAKRLDEGVSVLRVPLTQLKLKDLEKMVNREREPKLYEALKARLEAHKDDPAKAFAEPFYKYDKAGNRTQQVKAVRVEQVQKTGVWVRNHNGIADNATMVRVDVFEKGDKYYLVPIYSWQVAKGILPDRAVVQGKDEEDWQLIDDSFNFKFSLHPNDLVEVITKKARMFGYFASCHRGTGNINIRIHDLDHKIGKNGILEGIGVKTALSFQKYQIDELGKEIRPCRLKKRPPVR

SEQ ID NO: 340 - protein, 1082 aa, Neisseria meningitidis
MAAFKPNSINYILGLDIGIASVGWAMVEIDEEENPIRLIDLGVRVFERAEVPKTGDSLAMARRLARSVRRLTRRRAHRLLRTRRLLKREGVLQAANFDENGLIKSLPNTPWQLRAAALDRKLTPLEWSAVLLHLIKHRGYLSQRKNEGETADKELGALLKGVAGNAHALQTGDFRTPAELALNKFEKESGHIRNQRSDYSHTFSRKDLQAELILLFEKQKEFGNPHVSGGLKEGIETLLMTQRPALSGDAVQKMLGHCTFEPAEPKAAKNTYTAERFIWLTKLNNLRILEQGSERPLTDTERATLMDEPYRKSKLTYAQARKLLGLEDTAFFKGLRYGKDNAEASTLMEMKAYHAISRALEKEGLKDKKSPLNLSPELQDEIGTAFSLFKTDEDITGRLKDRIQPEILEALLKHISFDKFVQISLKALRRIVPLMEQGKRYDEACAEIYGDHYGKKNTEEKIYLPPIPADEIRNPVVLRALSQARKVINGVVRRYGSPARIHIETAREVGKSFKDRKEIEKRQEENRKDREKAAAKFREYFPNFVGEPKSKDILKLRLYEQQHGKCLYSGKEINLGRLNEKGYVEIDHALPFSRTWDDSFNNKVLVLGSENQNKGNQTPYEYFNGKDNSREWQEFKARVETSRFPRSKKQRILLQKFDEDGFKERNLNDTRYVNRFLCQFVADRMRLTGKGKKRVFASNGQITNLLRGFWGLRKVRAENDRHHALDAVVVACSTVAMQQKITRFVRYKEMNAFDGKTIDKETGEVLHQKTHFPQPWEFFAQEVMIRVFGKPDGKPEFEEADTLEKLRTLLAEKLSSRPEAVHEYVTPLFVSRAPNRKMSGQGHMETVKSAKRLDEGVSVLRVPLTQLKLKDLEKMVNREREPKLYEALKARLEAHKDDPAKAFAEPFYKYDKAGNRTQQVKAVRVEQVQKTGVWVRNHNGIADNATMVRVDVFEKGDKYYLVPIYSWQVAKGILPDRAVVQGKDEEDWQLIDDSFNFKFSLHPNDLVEVITKKARMFGYFASCHRGTGNINIRIHDLDHKIGKNGILEGIGVKTALSFQKYQIDELGKEIRPCRLKKRPPVR

SEQ ID NO: 341 - protein, 1082 aa, Neisseria meningitidis
  source 1..1082: note = 92045
MAAFKPNPINYILGLDIGIASVGWAMVEIDEEENPIRLIDLGVRVFERAEVPKTGDSLAMARRLARSVRRLTRRRAHRLLRARRLLKREGVLQAADFDENGLIKSLPNTPWQLRAAALDRKLTPLEWSAVLLHLIKHRGYLSQRKNEGETADKELGALLKGVADNAHALQTGDFRTPAELALNKFEKECGHIRNQRGDYSHTFSRKDLQAELNLLFEKQKEFGNPHVSGGLKEGIETLLMTQRPALSGDAVQKMLGHCTFEPAEPKAAKNTYTAERFIWLTKLNNLRILEQGSERPLTDTERATLMDEPYRKSKLTYAQARKLLGLEDTAFFKGLRYGKDNAEASTLMEMKAYHAISRALEKEGLKDKKSPLNLSPELQDEIGTAFSLFKTDEDITGRLKDRIQPEILEALLKHISFDKFVQISLKALRRIVPLMEQGKRYDEACAEIYGDHYGKKNTEEKIYLPPIPADEIRNPVVLRALSQARKVINGVVRRYGSPARIHIETAREVGKSFKDRKEIEKRQEENRKDREKAAAKFREYFPNFVGEPKSKDILKLRLYEQQHGKCLYSGKEINLVRLNEKGYVEIDHALPFSRTWDDSFNNKVLVLGSENQNKGNQTPYEYFNGKDNSREWQEFKARVETSRFPRSKKQRILLQKFDEEGFKERNLNDTRYVNRFLCQFVADHILLTGKGKRRVFASNGQITNLLRGFWGLRKVRAENDRHHALDAVVVACSTVAMQQKITRFVRYKEMNAFDGKTIDKETGEVLHQKTHFPQPWEFFAQEVMIRVFGKPDGKPEFEEADTPEKLRTLLAEKLSSRPEAVHEYVTPLFVSRAPNRKMSGQGHMETVKSAKRLDEGVSVLRVPLTQLKLKDLEKMVNREREPKLYEALKARLEAHKDDPAKAFAEPFYKYDKAGNRTQQVKAVRVEQVQKTGVWVRNHNGIADNATMVRVDVFEKGGKYYLVPIYSWQVAKGILPDRAVVQGKDEEDWQLIDDSFNFKFSLHPNDLVEVITKKARMFGYFASCHRGTGNINIRIHDLDHKIGKNGILEGIGVKTALSFQKYQIDELGKEIRPCRLKKRPPVR

SEQ ID NO: 342 - protein, 1081 aa, Neisseria meningitidis
  source 1..1081: note = 93003
MAAFKPNPINYILGLDIGIASVGWAMVEIDEEENPIRLIDLGVRVFERAEVPKTGDSLAMARRLARSVRRLTRRRAHRLLRARRLLKREGVLQAADFDENGLIKSLPNTPWQLRAAALDRKLTPLEWSAVLLHLIKHRGYLSQRKNEGETADKELGALLKGVADNAHALQTGDFRTPAELALNKFEKESGHIRNQRGDYSHTFSRKDLQAELILLFEKQKEFGNPHVSGGLKEGIETLLMTQRPALSGDAVQKMLGHCTFEPAEPKAAKNTYTAERFIWLTKLNNLRILEQGSERPLTDTERATLMDEPYRKSKLTYAQARKLLGLEDTAFFKGLRYGKDNAEASTLMEMKAYHAISRALEKEGLKDKKSPLNLSPELQDEIGTAFSLFKTDEDITGRLKDRVQPEILEALLKHISFDKFVQISLKALRRIVPLMEQGKRYDEACAEIYGDHYGKKNTEEEIYLPPITADEIRNPVVLRALSQARKVINAVVRRYGSPARIHIETAREVGKSFKDRKEIEKRQEENRKDREKAAAKFREYFPNFVGEPKSKDILKLRLYEQQHGKCLYSGKEINLVRLNEKGYVEIDHALPFSRTWDDSFNNKVLVLGSENQNKGNQTPYEYFNGKENSREWQEFKARVETSRFPRSKKQRILLQKFDEDGFKERNLNDTRYVNRFLCQFVADRMRLTGKGKKRVFASNGQITNLLRGFWGLHKVRAENDRHHALDAVVVACSTIAMQQKITRFVRYKEMNAFDGKTIDKETGEVLHQKAHFPQPWEFFAQEVMIRVFGKPDGKPEFEEADTPEKLRTLLAEKLSSRPEAVHEYVTPLFVSRAPNRKMSGQGHMETVKSAKRLDEGISVLRVPLTQLKLKDLEKMVNRAREPKLYEALKARLEAHKDDPAKAFAEPFYKYDKAGNRTQQVKAVRVEQVQKTGVWVRNHNGIADNATMVRVDVFEKAGKYYLVPIYSWQVAKGILPDRAVVAYADEEDWTVIDESFRFKFVLYSNDLIKVQLKKDSFLGYFSGLDRATGAISLREHDLEKSKGKDGMHRIGVKTALSFQKYQIDEMGKEIRPCRLKKRPPVR

SEQ ID NO: 343 - protein, 1081 aa, Neisseria meningitidis
  source 1..1081: note = 93004
MAAFKPNPINYILGLDIGIASVGWAMVEIDEDENPICLIDLGVRVFERAEVPKTGDSLAMARRLARSVRRLTRRRAHRLLRARRLLKREGVLQAADFDENGLIKSLPNTPWQLRAAALDRKLTPLEWSAVLLHLIKHRGYLSQRKNEGETADKELGALLKGVADNAHALQTGDFRTPAKLALNKFEKESGHIRNQRGDYSHTFSRKDLQAELNLLFEKQKEFGNPHISDGLKEGIETLLMTQRPALSGDAVQKMLGHCTFEPTEPKAAKNTYTAERFVWLTKLNNLRILEQGSEQPLTDTQRAKLMDEPYRKSKLTYAQARKLLGLEDTAFFKGLRYGKDNAEASTLMEMKAYHAISRALEKEGLKDKKSPLNLSPELQDEIGTAFSLFKTDEDITGRLKDRVQPEILEALLKHISFDKFVQISLKALRRIVPLMEQGKRYNEACAEIYGDHYGKKNTEEKIYLPPIPADEIRNPVVLRALSQARKVINGVVRRYGSPARIHIETAREVGKSFKDRKEIEKRQEENRKDREKAAAKFQEYFPNFVGEPKSKDILKLRLYEQQHGKCLYSGKEINLGRLNEKGYVEIDHALPFSRTWDDSFNNKVLVLGSENQNKGNQTPYEYFNGKDNSREWQEFKARVETSRFPRSKKQRILLQKFDEDGFKERNLNDTRYVNRFLCQFVADRMRLTGKGKKRVFASNGQITNLLRGFWGLRKVRAENDRHHALDAVVVACSTVAMQQKITRFVRYKEMNAFDGKTIDKETGEVLHQKTHFPQPWEFFAQEVMIRVFGKPDGKPEFEEADTPEKLRTLLAEKLSSRPEAVHEYVTPLFVSRAPNRKMSGQGHMETVKSAKRLDEGVSVLRVPLTQLKLKDLEKMVNREREPKLYEALKARLEAHKDDPAKAFAEPFYKYDKAGNRTQQVKAVRVEQVQKTGVWVRNHNGIADNATMVRVDVFEKGDKYYLVPIYSWQVAKGILPDRAVVAYADEEDWTVIDESFRFKFVLYSNDLIKVQLKKDSFLGYFSGLDRATGAISLREHDLEKSKGKDGMHRIGVKTALSFQKYQIDEMGKEIRPCRLKKRPPVR

SEQ ID NO: 344 - protein, 1082 aa, Neisseria meningitidis
  source 1..1082: note = 96023
MAAFKPNPINYILGLDIGIASVGWAMVEIDEDENPICLIDLGVRVFERAEVPKTGDSLAMARRLARSVRRLTRRRAHRLLRARRLLKREGVLQAADFDENGLIKSLPNTPWQLRAAALDRKLTPLEWSAVLLHLIKHRGYLSQRKNEGETADKELGALLKGVADNAHALQTGDFRTPAELALNKFEKESGHIRNQRGDYSHTFSRKDLQAELILLFEKQKEFGNPHVSGGLKEGIETLLMTQRPALSSDAVQKMLGHCTFEPAEPKAAKNTYTAERFIWLTKLNNLRILEQGSERPLTDTERATLMDEPYRKSKLTYAQARKLLGLEDTAFFKGLRYGKDNAEASTLMEMKAYHAISRALEKEGLKDKKSPLNLSPELQDEIGTAFSLFKTDEDITGRLKDRIQPEILEALLKHISFDKFVQISLKALRRIVPLMEQGKRYDEACAEIYGDHYGKKNTEEKIYLPPIPADEIRNPVVLRALSQARKVINGVVRRYGSPARIHIETAREVGKSFKDRKEIEKRQEENRKDREKAAAKFREYFPNFVGEPKSKDILKLRLYEQQHGKCLYSGKEINLGRLNEKGYVEIDHALPFSRTWDDSFNNKVLVLGSENQNKGNQTPYEYFNGKDNSREWQEFKARVETSRFPRSKKQRILLQKFDEDGFKERNLNDTRYVNRFLYQFVADRMRLTGKGKKRVFASNGQITNLLRGFWGLRKVRAENDRHHALDAVVVACSTVAMQQKITRFVRYKEMNAFDGKTIDKETGEVLHQKTHFPQPWEFFAQEVMIRVFGKPDGKPEFEEADTPEKLRTLLAEKLSSRPEAVHEYVTPLFVSRAPNRKMSGQGHMETVKSAKRLDEGVSVLRVPLTQLKLKDLEKMVNREREPKLYEALKARLEAHKDDPAKAFAEPFYKYDKAGNRTQQVKAVRVEQVQKTGVWVRNHNGIADNATMVRVDVFEKGDKYYLVPIYSWQVAKGILPDRAVVQGKDEEDWQLIDDSFNFKFSLHPNDLVEVITKKARMFGYFASCHRGTGNINIRIHDLDHKIGKNGILEGIGVKTALSFQKYQIDELGKEIRPCRLKKRPPVR

SEQ ID NO: 345 - protein, 1081 aa, Neisseria meningitidis
  source 1..1081: note = 98008
MAAFKPNPINYILGLDIGIASVGWAMVEIDEDENPICLIDLGVRVFERAEVPKTGDSLAAARRLARSVRRLTRRRAHRLLRARRLLKREGVLQAADFDENGLIKSLPNTPWQLRSAALDRKLTPLEWSAVLLHLIKHRGYLSQRKNEGETADKELGALLKGVANNAHALQTGDFRTPAELALNKFEKESGHIRNQRGDYSHTFSRKDLQAELILLFEKQKEFGNPHVSGGLKEGIETLLMTQRPALSGDAVQKMLGHCTFEPAEPKAAKNTYTAERFIWLTKLNNLRILEQGSERPLTDTERATLMDEPYRKSKLTYAQARKLLGLEDTAFFKGLRYGKDNAEASTLMEMKAYHAISRALEKEGLKDKKSPLNLSPELQDEIGTAFSLFKTDEDITGRLKDRIQPEILEALLKHISFDKFVQISLKALRRIVPLMEQGKRYDEACAEIYGDHYGKKNTEEKIYLPPIPADEIRNPVVLRALSQARKVINGVVRRYGSPARIHIETAREVGKSFKDRKEIEKRQEENRKDREKAAAKFREYFPNFVGEPKSKDILKLRLYEQQHGKCLYSGKEINLGRLNEKGYVEIDHALPFSRTWDDSFNNKVLVLGSENQNKGNQTPYEYFNGKDNSREWQEFKARVETSRFPRSKKQRILLQKFDEDGFKERNLNDTRYVNRFLCQFVADRMRLTGKGKKRVFASNGQITNLLRGFWGLRKVRAENDRHHALDAVVVACSTVAMQQKITRFVRYKEMNAFDGKTIDKETGEVLHQKTHFPQPWEFFAQEVMIRVFGKPDGKPEFEEADTPEKLRTLLAEKLSSRPEAVHEYVTPLFVSRAPNRKMSGQGHMETVKSAKRLDEGVSVLRVPLTQLKLKDLEKMVNREREPKLYEALKARLEAHKDDPAKAFAEPFYKYDKAGNRTQQVKAVRVEQVQKTGVWVRNHNGIADNATMVRVDVFEKAGKYYLVPIYSWQVAKGILPDRAVVAYADEEGWTVIDESFRFKFVLYSNDLIKVQLKKDSFLGYFSGLDRATGAISLREHDLEKSKGKDGMHRIGVKTALSFQKYQIDEMGKEIRLCRLKKRPPVR

SEQ ID NO: 346 - protein, 1082 aa, Neisseria meningitidis
MAAFKPNPINYILGLDIGIASVGWAMVEIDEEENPIRLIDLGVRVFERAEVPKTGDSLAMVRRLARSVRRLTRRRAHRLLRARRLLKREGVLQAADFDENGLIKSLPNTPWQLRAAALDRKLTPLEWSAVLLHLIKHRGYLSQRKNEGETADKELGALLKGVADNAHALQTGDFRTPAELALNKFEKESGHIRNQRGDYSHTFSRKDLQAELILLFEKQKEFGNPHISGGLKEGIETLLMTQRPALSGDAVQKMLGHCTFEPAEPKAAKNTYTAERFIWLTKLNNLRILEQGSERPLTDTERATLMDEPYRKSKLTYAQARKLLGLEDTAFFKGLRYGKDNAEASTLMEMKAYHAISRALEKEGLKDKKSPLNLSPELQDEIGTAFSLFKTDEDITGRLKDRIQPEILEALLKHISFDKFVQISLKALRRIVPLMEQGKRYDEACAEIYGDHYGKKNTEEKIYLPPIPADEIRNPVVLRALSQARKVINGVVRRYGSPARIHIETAREVGKSFKDRKEIEKRQEENRKDREKAAAKFREYFPNFVGEPKSKDILKLRLYEQQHGKCLYSGKEINLGRLNEKGYVEIDHALPFSRTWDDSFNNKVLVLGSENQNKGNQTPYEYFNGKDNSREWQEFKARVETSRFPRSKKQRILLQKFDEDGFKERNLNDTRYVNRFLCQFVADRMRLTGKGKKRVFASNGQITNLLRGFWGLRKVRAENDRHHALDAVVVACSTVAMQQKITRFVRYKEMNAFDGKTIDKETGEVLHQKTHFPQPWEFFAQEVMIRVFGKPDGKPEFEEADTPEKLRTLLAEKLSSRPEAVHEYVTPLFVSRAPNRKMSGQGHMETVKSAKRLDEGVSVLRVPLTQLKLKDLEKMVNREREPKLYEALKARLEAHKDDPAKAFAEPFYKYDKAGNRTQQVKAVRVEQVQKTGVWVRNHNGIADNATMVRVDVFEKGDKYYLVPIYSWQVAKGILPDRAVVQGKDEEDWQLIDDSFNFKFSLHPNDLVEVITKKARMFGYFASCHRGTGNINIRIHDLDHKIGKNGILEGIGVKTALSFQKYQIDELGKEIRPCRLKKRPPVR

SEQ ID NO: 347 - protein, 1082 aa, Neisseria meningitidis
  source 1..1082: note = alpha275
MAAFKPNPINYILGLDIGIASVGWAMVEIDEDENPICLIDLGVRVFERAEVPKTGDSLAAARRLARSVRRLTRRRAHRLLRARRLLKREGVLQAADFDENGLIKSLPNTPWQLRAAALDRKLTPLEWSAVLLHLIKHRGYLSQRKNEGETADKELGALLKGVADNAHALQTGDFRTPAELALNKFEKESGHIRNQRGDYSHTFSRKDLQAELILLFEKQKEFGNPHVSGGLKEGIETLLMTQRPALSGDAVQKMLGHCTFEPAEPKAAKNTYTAERFIWLTKLNNLRILEQGSERPLTDTERATLMDEPYRKSKLTYAQARKLLGLEDTAFFKGLRYGKDNAEASTLMEMKAYHAISRALEKEGLKDKKSPLNLSPELQDEIGTAFSLFKTDEDITGRLKDRVQPEILEALLKHISFDKFVQISLKALRRIVPLMEQGKRYDEACAEIYGDHYGKKNTEEKIYLPPIPADEIRNPVVLRALSQARKVINGVVRRYGSPARIHIETAREVGKSFKDRKEIEKRQEENRKDREKAAAKFREYFPNFVGEPKSKDILKLRLYEQQHGKCLYSGKEINLGRLNEKGYVEIDHALPFSRTWDDSFNNKVLVLGSENQNKGNQTPYEYFNGKDNSREWQEFKARVETSRFPRSKKQRILLQKFDEDGFKERNLNDTRYVNRFLCQFVADRMRLTGKGKKRVFASNGQITNLLRGFWGLRKVRAENDRHHALDAVVVACSTVAMQQKITRFVRYKEMNAFDGKTIDKETGEVLHQKTHFPQPWEFFAQEVMIRVFGKPDGKPEFEEADTPEKLRTLLAEKLSSRPEAVHEYVTPLFVSRAPNRKMSGQGHMETVKSAKRLDEGVSVLRVPLTQLKLKDLEKMVNREREPKLYEALKARLEAHKDDPAKAFAEPFYKYDKAGNRTQQVKAVRVEQVQKTGVWVRNHNGIADNATMVRVDVFEKGDKYYLVPIYSWQVAKGILPDRAVVQGKDEEDWQLIDDSFNFKFSLHPNDLVEVITKKARMFGYFASCHRGTGNINIRIHDLDHKIGKNGILEGIGVKTALSFQKYQIDELGKEIRPCRLKKRPPVR

SEQ ID NO: 348 - protein, 1082 aa, Neisseria meningitidis
  source 1..1082: note = ATCC 13091
MAAFKPNPINYILGLDIGIASVGWAMVEIDEEENPIRLIDLGVRVFERAEVPKTGDSLAMARRLARSVRRLTRRRAHRLLRTRRLLKREGVLQAANFDENGLIKSLPNTLWQLRAAALDRKLTPLEWSAVLLHLIKHRGYLSQRKNEGETADKELGALLKGVAGNAHALQTGDFRTPAELALNKFEKESGHIRNQRGDYSHTFSRKDLQAELNLLFEKQKEFGNPHISDGLKEGIETLLMTQRPALSGDAVQKMLGHCTFEPTEPKAAKNTYTTERFIWLTKLNNLRILEQGSERPLTDTERATLMDEPYRKSKLTYAQARKLLELDDIAFFKGLRYGKDNAEASTLMEMKAYHAISRALEKEGLKDKKSPLNLSPELQDEIGTAFSLFKTDEDITGRLKDRIQPEILEALLKHINFDKFVQISLKALRRIVPLMEQGKRYDEACAEIYGDHYGKKNTEEKIDLPPIPADEIHNPVVLRALSQARKVINGVVRRYGSPARIHIETAREVGKSFKDRKEIEKRQEENRKDREKAAAKFREYFPNFVGEPKSKDILKLRLYEQQHGKCLYSGKEINLGRLNEKGYVEIDHALPFSRTWDDSFNNKVLVLGSENQNKGNQTPYEYFNGKDNSREWQEFKARVETSRFPRSKKQRILLQKFDEDGFKERNLNDTRYVNRFLCQFVADRMRLTGKGKKRVFASNGQITNLLRGFWGLRKVRAENDRHHALDAVVVACSTVAMQQKITRFVRYKEMNAFDGKTIDKETGEVLHQKTHFPQPWEFFAQEVMIRVFGKPDGKPEFEEADTPEKLRTLLTEKLSSRPEAVHEYVTPLFVSRAPNRKMSGQGHMETVKSAKRLDEGISVLRVPLTQLKLKDLEKMVNREREPKLYEALKARLEAHKDDPAKAFAEPFYKYDKAGNRTQQVKAMRVEQVQKTGVWVRNHNGIADNATMVRVDVFEKGDKYYLVPIYSWQVAKGILPDRAVVQGKDEEDWQLIDDSFNFKFSLHPNDLVEVITKKARMFGYFASCHRGTGNINIRIHDLDHKIGKNGILEGIGVKTALSFQKYQIDELGKEIRPCRLKKRPPVR

SEQ ID NO: 349 - protein, 1081 aa, Neisseria meningitidis
  source 1..1081: note = N1568
MAAFKPNPINYILGLDIGIASVGWAMVEIDEEENPIRLIDLGVRVFERAEVPKTGDSLAMARRLARSVRRLTRRRAHRLLRARRLLKREGVLQAADFDENGLIKSLPNTPWQLRAAALDRKLTPLEWSAVLLHLIKHRGYLSQRKNEGETADKELGALLKGVADNAHALQTGDFRTPAELALNKFEKECGHIRNQRGDYSHTFSRKDLQAELNLLFEKQKEFGNPHVSGGLKEGIETLLMTQRPALSGDAVQKMLGHCTFEPAEPKAAKNTYTAERFIWLTKLNNLRILEQGSERPLTDTERATLMDEPYRKSKLTYAQARKLLSLEDTAFFKGLRYGKDNAEASTLMEMKAYHTISRALEKEGLKDKKSPLNLSPELQDEIGTAFSLFKTDEDITGRLKDRIQPEILEALLKHISFDKFVQISLKALRRIVPLMEQGKRYDEACAEIYGDHYGKKNTEEKIYLPPIPADEIRNPVVLRALSQARKVINGVVRRYGSPARIHIETAREVGKSFKDRKEIEKRQEENRKDREKAAAKFREYFPNFVGEPKSKDILKLRLYEQQHGKCLYSGKEINLGRLNEKGYVEIDHALPFSRTWDDSFNNKVLVLGSENQNKGNQTPYEYFNGKDNSREWQEFKARVETSRFPRSKKQRILLQKFDEDGFKERNLNDTRYVNRFLCQFVADRMRLTGKGKKRVFASNGQITNLLRGFWGLRKVRAENDRHHALDAVVVACSTVAMQQKITRFVRYKEMNAFDGKTIDKETGEVLHQKTHFPQPWEFFAQEVMIRVFGKPDGKPEFEEADTPEKLRTLLAEKLSSRPEAVHEYVTPLFVSRAPNRKMSGQGHMETVKSAKRLDEGVSVLRVPLTQLKLKDLEKMVNREREPKLYEALKARLEAHKDDPAKAFAEPFYKYDKAGNRTQQVKAVRVEQVQKTGVWVRNHNGIADNATMVRVDVFEKGDKYYLVPIYSWQVAKGILPDRAVVAYADEEDWTVIDESFRFKFVLYSNDLIKVQLKKDSFLGYFSGLDRATGAISLREHDLEKSKGKDGMHRIGVKTALSFQKYQIDEMGKEIRPCRLKKRPPVR

SEQ ID NO: 350 - protein, 1081 aa, Neisseria meningitidis
  source 1..1081: note = NM140
MAAFKPNPINYILGLDIGIASVGWAMVEIDEDENPICLIDLGVRVFERAEVPKTGDSLAAARRLARSVRRLTRRRAHRLLRARRLLKREGVLQAADFDENGLIKSLPNTPWQLRSAALDRKLTPLEWSAVLLHLIKHRGYLSQRKNEGETADKELGALLKGVADNAHALQTGDFRTPAELALNKFEKESGHIRNRRGDYSHTFSRKDLQAELDLLFEKQKEFGNPHISDDLKEGIETLLMTQRPALSGDAVQKMLGHCTFEPTEPKAAKNTYTAERFVWLTKLNNLRILEQGSERPLTDTERATLMDEPYRKSKLTYAQARKLLELDDTAFFKGLRYGKDNAEASTLMEMKAYHAISRALEKEGLKDKKSPLNLSPELQDEIGTAFSLFKTDEDITGRLKDRVQPEILEVLLKHISFDKFVQISLKALRRIVPLMEQGKRYDEACAEIYGDHDGKKNTEEKIYLPPIPADEIRNPVVLRALSQARKVINAVVRRYGSPARIHIETAREVGKSFKDRKEIEKRQEENRKDREKAAAKFREYFPNFVGEPKSKDILKLRLYEQQHGKCLYSGKEINLGRLNEKGYVEIDHALPFSRTWDDSFNNKVLVLGSENQNKGNQTPYEYFNGKDNSREWQEFKARVETSRFPRSKKQRILLQKFDEEGFKERNLNDTRYVNRFLCQFVADHMLLTGKGKRRVFASNGQITNLLRGFWGLRKVRAENNRHHALDAVVVACSTVAMQQKITRFVRYKEMNAFDGKTIDKETGEVLHQKTHFPQPWEFFAQEVMIRVFGKPDGKPEFEEADTPEKLRTLLAEKLSSRPEAVHEYVTPLFVSRAPNRKMSGQGHMETVKSAKRLDEGVSVLRVPLTQLKLKDLEKMVNREREPKLYEALKARLEAHKDDPAKAFAEPFYKYDKAGNRTQQVKAVRVEQVQKTGVWVRNHNGIADNATMVRVDVFEKAGKYYLVPIYSWQVAKGILPDRAVVAYADEEGWTVIDESFRFKFVLYSNDLIKVQLKKDSFLGYFSGLDRATGAISLREHDLEKSKGKDGMHRIGVKTALSFQKYQIDEMGKEIRLCRLKKRPPVR

SEQ ID NO: 351 - protein, 1082 aa, Neisseria meningitidis
  source 1..1082: note = NM220
MAAFKPNPINYILGLDIGIASVGWAMVEIDEEENPIRLIDLGVRVFERAEVPKTGDSLAMARRLARSVRRLTRRRAHRLLRARRLLKREGVLQAADFDENGLIKSLPNTPWQLRAAALDRKLTPLEWSAVLLHLIKHRGYLSQRKNEGETADKELGALLKGVANNAHALQTGDFRTPAELALNKFEKESGHIRNQRGDYSHTFSRKDLQAELILLFEKQKEFGNPHVSGGLKEGIETLLMTQRPALSGDAVQKMLGHCTFEPAEPKAAKNTYTAERFIWLTKLNNLRILEQGSERPLTDTERATLMDEPYRKSKLTYAQARKLLGLEDTAFFKGLRYGKDNAEASTLMEMKAYHAISRALEKEGLKDKKSPLNLSSELQDEIGTAFSLFKTDEDITGRLKDRVQPEILEALLKHISFDKFVQISLKALRRIVPLMEQGKRYDEACAEIYGDHYGKKNTEEKIYLPPIPADEIRNPVVLRALSQARKVINGVVRRYGSPARIHIETAREVGKSFKDRKEIEKRQEENRKDREKAAAKFREYFPNFVGEPKSKDILKLRLYEQQHGKCLYSGKEINLVRLNEKGYVEIDHALPFSRTWDDSFNNKVLVLGSENQNKGNQTPYEYFNGKDNSREWQEFKARVETSRFPRSKKQRILLQKFDEDGFKECNLNDTRYVNRFLCQFVADHILLTGKGKRRVFASNGQITNLLRGFWGLRKVRAENDRHHALDAVVVACSTVAMQQKITRFVRYKEMNAFDGKTIDKETGKVLHQKTHFPQPWEFFAQEVMIRVFGKPDGKPEFEEADTPEKLRTLLAEKLSSRPEAVHEYVTPLFVSRAPNRKMSGAHKDTLRSAKRFVKHNEKISVKRVWLTEIKLADLENMVNYKNGREIELYEALKARLEAYGGNAKQAFDPKDNPFYKKGGQLVKAVRVEKTQESGVLLNKKNAYTIADNGDMVRVDVFCKVDKKGKNQYFIVPIYAWQVAENILPDIDCKGYRIDDSYTFCFSLHKYDLIAFQKDEKSKVEFAYYINCDSSNGRFYLAWHDKGSKEQQFRISTQNLVLIQKYQVNELGKEIRPCRLKKRPPVR

SEQ ID NO: 352 - protein, 1082 aa, Neisseria meningitidis
  source 1..1082: note = NM233
MAAFKPNPINYILGLDIGIASVGWAMVEIDEEENPIRLIDLGVRVFERAEVPKTGDSLAMARRLARSVRRLTRRRAHRLLRARRLLKREGVLQAADFDENGLIKSLPNTPWQLRAAALDRKLTPLEWSAVLLHLIKHRGYLSQRKNEGETADKELGALLKGVANNAHALQTGDFRTPAELALNKFEKESGHIRNQRGDYSHTFSRKDLQAELILLFEKQKEFGNPHVSGGLKEGIETLLMTQRPALSGDAVQKMLGHCTFEPAEPKAAKNTYTAERFIWLTKLNNLRILEQGSERPLTDTERATLMDEPYRKSKLTYAQARKLLGLEDTAFFKGLRYGKDNAEASTLMEMKAYHAISRALEKEGLKDKKSPLNLSSELQDEIGTAFSLFKTDEDITGRLKDRVQPEILEALLKHISFDKFVQISLKALRRIVPLMEQGKRYDEACAEIYGDHYGKKNTEEKIYLPPIPADKIRNPVVLRALSQARKVINGVVRRYGSPARIHIETAREVGKSFKDRKEIEKRQEENRKDREKAAAKFREYFPNFVGEPKSKDILKLRLYEQQHGKCLYSGKEINLVRLNEKGYVEIDHALPFSRTWDDSFNNKVLVLGSENQNKGNQTPYEYFNGKDNSREWQEFKARVETSRFPRSKKQRILLQKFDEDGFKECNLNDTRYVNRFLCQFVADHILLTGKGKRRVFASNGQITNLLRGFWGLRKVRAENDRHHALDAVVVACSTVAMQQKITRFVRYKEMNAFDGKTIDKETGKVLHQKTHFPQPWEFFAQEVMIRVFGKPDGKPEFEEADTPEKLRTLLAEKLSSRPEAVHEYVTPLFVSRAPNRKMSGAHKDTLRSAKRFVKHNEKISVKRVWLTEIKLADLENMVNYKNGREIELYEALKARLEAYGGNAKQAFDPKDNPFYKKGGQLVKAVRVEKTQESGVLLNKKNAYTIADNGDMVRVDVFCKVDKKGKNQYFIVPIYAWQVAENILPDIDCKGYRIDDSYTFCFSLHKYDLIAFQKDEKSKVEFAYYINCDSSNGRFYLAWHDKGSKEQQFRISTQNLVLIQKYQVNELGKEIRPCRLKKRPPVR

SEQ ID NO: 353 - protein, 1082 aa, Neisseria meningitidis
MAAFKPNPINYILGLDIGIASVGWAMVEIDEDENPICLIDLGVRVFERAEVPKTGDSLAMARRLARSVRRLTRRRAHRLLRARRLLKREGVLQAADFDENGLIKSLPNTPWQLRAAALDRKLTPLEWSAVLLHLIKHRGYLSQRKNEGETADKELGALLKGVADNAHALQTGDFRTPAELALNKFEKESGHIRNQRGDYSHTFSRKDLQAELILLFEKQKEFGNPHVSGGLKEGIETLLMTQRPALSSDAVQKMLGHCTFEPAEPKAAKNTYTAERFIWLTKLNNLRILEQGSERPLTDTERATLMDEPYRKSKLTYAQARKLLGLEDTAFFKGLRYGKDNAEASTLMEMKAYHAISRALEKEGLKDKKSPLNLSPELQDEIGTAFSLFKTDEDITGRLKDRIQPEILEALLKHISFDKFVQISLKALRRIVPLMEQGKRYDEACAEIYGDHYGKKNTEEKIYLPPIPADEIRNPVVLRALSQARKVINGVVRRYGSPARIHIETAREVGKSFKDRKEIEKRQEENRKDREKAAAKFREYFPNFVGEPKSKDILKLRLYEQQHGKCLYSGKEINLGRLNEKGYVEIDHALPFSRTWDDSFNNKVLVLGSENQNKGNQTPYEYFNGKDNSREWQEFKARVETSRFPRSKKQRILLQKFDEDGFKERNLNDTRYVNRFLCQFVADRMRLTGKGKKRVFASNGQITNLLRGFWGLRKVRAENDRHHALDAVVVACSTVAMQQKITRFVRYKEMNAFDGKTIDKETGEVLHQKTHFPQPWEFFAQEVMIRVFGKPDGKPEFEEADTPEKLRTLLAEKLSSRPEAVHEYVTPLFVSRAPNRKMSGQGHMETVKSAKRLDEGVSVLRVPLTQLKLKDLEKMVNREREPKLYEALKARLEAHKDDPAKAFAEPFYKYDKAGNRTQQVKAVRVEQVQKTGVWVRNHNGIADNATMVRVDVFEKGDKYYLVPIYSWQVAKGILPDRAVVQGKDEEDWQLIDDSFNFKFSLHPNDLVEVITKKARMFGYFASCHRGTGNINIRIHDLDHKIGKNGILEGIGVKTALSFQKYQIDELGKEIRPCRLKKRPPVR

SEQ ID NO: 354 - protein, 1082 aa, Neisseria meningitidis
MAAFKPNPINYILGLDIGIASVGWAMVEIDEDENPICLIDLGVRVFERAEVPKTGDSLAMARRLARSVRRLTRRRAHRLLRARRLLKREGVLQAADFDENGLIKSLPNTPWQLRAAALDRKLTPLEWSAVLLHLIKHRGYLSQRKNEGETADKELGALLKGVADNAHALQTGDFRTPAELALNKFEKESGHIRNQRGDYSHTFSRKDLQAELILLFEKQKEFGNPHVSGGLKEGIETLLMTQRPALSGDAVQKMLGHCTFEPAEPKAAKNTYTAERFIWLTKLNNLRILEQGSERPLTDTERATLMDEPYRKSKLTYAQARKLLGLEDTAFFKGLRYGKDNAEASTLMEMKAYHAISRALEKEGLKDKKSPLNLSPELQDEIGTAFSLFKTDEDITGRLKDRIQPEILEALLKHISFDKFVQISLKALRRIVPLMEQGKRYDEACAEIYGDHYGKKNTEEKIYLPPIPADEIRNPVVLRALSQARKVINGVVRRYGSPARIHIETAREVGKSFKDRKEIEKRQEENRKDREKAAAKFREYFPNFVGEPKSKDILKLRLYEQQHGKCLYSGKEINLGRLNEKGYVEIDHALPFSRTWDDSFNNKVLVLGSENQNKGNQTPYEYFNGKDNSREWQEFKARVETSRFPRSKKQRILLQKFDEDGFKERNLNDTRYVNRFLCQFVADRMRLTGKGKKRVFASNGQITNLLRGFWGLRKVRAENDRHHALDAVVVACSTVAMQQKITRFVRYKEMNAFDGKTIDKETGEVLHQKTHFPQPWEFFAQEVMIRVFGKPDGKPEFEEADTPEKLRTLLAEKLSSRPEAVHEYVTPLFVSRAPNRKMSGQGHMETVKSAKRLDEGVSVLRVPLTQLKLKDLEKMVNREREPKLYEALKARLEAHKDDPAKAFAEPFYKYDKAGNRTQQVKAVRVEQVQKTGVWVRNHNGIADNATMVRVDVFEKGDKYYLVPIYSWQVAKGILPDRAVVQGKDEEDWQLIDDSFNFKFSLHPNDLVEVITKKARMFGYFASCHRGTGNINIRIHDLDHKIGKNGILEGIGVKTALSFQKYQIDELGKEIRPCRLKKRPPVR

SEQ ID NO: 355 - protein, 1089 aa, Neisseria sp.
  source 1..1089: note = oral taxon 014 str. F0314
MTAFKPNPLNYILGLDIGIASVGWAMVEIDDKENPVRLIDLGVRVFERAEMPKTGDSLAAARRLARSVRRLTRRRAHRLLRARRLLKHEGVLKPEDFDENGLVKPLPYIPKQPRNTPWQLRAAALDRKLTPLEWAAVLLHLVKHRGYLSQRKNEGETDDKELGALLKGVADNTHALQAGNFRTPAELALNKFEKESGHIRNQRGDYSHTFSRKDLQAELVLLFEKQKEFGNPYVSDDLKNGIENLLMTQRPALSGDAIQKMLGHCTFEPAEPKAAKNTYTAERFIWLTKLNNLRILNQGNERPLTDAERTTLMDEPYKKSKLTYAQARKLLDLDDTAFFKGLRYGKDNAESATLMEMKAYHAISRALEKEGLKDKKSPLSLSPELQDEIGTAFSLFKTDEEITGRLKGCLQPEILDALLKHISFDKFVQISLKALRRIVPLMEQGKRYDEACAEIYGDHHGRRNSEETLYLPPIPADEIRNPVVLRALSQARKVINGVGRRYGSPARIHIETAREVGKSFKDRKEIEKRQEENRKDREKAAAEFQEYFPNFVGEPKSKDILKLRLYRQQNCKCLYSGKEINLGRLNEKGYVEIDHALPFSRTWDDSFNNKVLVLGSENQNKGNRTPYEYLNGKDNSREWQEFKARVETSRFPHSKKQRILLQKFDEEGFKERNLNDTRYVNRFLCKFVADHMQLTGKGKRRVFASNGQITNLLRGFWGLRKVRAENDRHHALDAVVVACSTVAMQQRITRFVRYKEMNAFDGKTVDKETGEVLHQKTHFPQPWEFFAQEVMIRVFGKPDGKPELEEADTPEKLRALLAEKLSSRPEAVHEYVAPLFVSRAPNRKMSGQGHMETIKSPKRLDEGISVVRVPLTQLKLKDLEKMVNREREPKLYEALKARLEAHKDDPAKAFAEPFYKQDKAGNRTQQVKAVRIEQVQKTGVWVRNQNGIADNATMVRVDVFEKGGKYYLVPIYSWQVAKGILPDKAIIAFKDEEEWQLIDDSFNFKFPLHPNDLVEVITKKARIFGYFASCHRGTGNINIRIHDLDNKVGKNGILEGIGVKTALSFQKYQIDELGKEIRPCRLKKRPPVR

SEQ ID NO: 356 - protein, 1097 aa, Neisseria wadsworthii
  source 1..1097: note = 9715
MKKQPQRYILGLDLGIASVGWALILVDGAENPVGLLDCGVRTFERAEVPKTGDSLALARRQARSVRRLIRRRAHRLLRLRRLLKREGILSAADFNSDGLPNLPIDAWQLRVAGLERKLTNQEWAAVLLHLVKHRGYLSQRKSETQTENKELGRLLAGVAENSKLLSESSEQYRTPAELAVKLFAEQSGHLRNKGGEYTHTFNRLDLQKELHLLFERQYALGNPFASAELQSKVDELLMTQRSALQGEAVLKMLGKCTFEPSEYKAAKNTYSAERFIWLTKLNNLRILYNGEERALDEGDRKKLLDEPYKKAKLTYKQVRSILNLPESAVFKGLRYGKDSDGLKAENGTLMEMKAYHKIRTILDKAGLKGEWENRIRNPEILDKIGTAFSLYKTDEDIQAALADLRLPENVLDALLAGLNFDKFIQLSLKALRNILPLMERGIRYDEACKEVYGDHRALAESKNQVLLPPIPADEIRNPVVLRTLTQARKVINAIIRRYGSPQRVHIETARELGKSKQERDKIDRKNKENQNDRNRLASDIRKHFNFEPTPKDILKLRLYEQQHGKCLYSDLREEKGECLYTGNVIELHRLFEDGYVEIDHALPLSRTWDNSLNNKVLVLKSSNQNKGNKTPYEWLDGANNSRRWREFQARVQGCHFPYVKKQRIQTAKLDSKAEQGFLERNLNDTRYISKFMCQFITANLRLAETSNALMEEVAGENPYWKERKRQRVFAPSGSIIALLRGLWGLKKVREDNDRHHALDAIVVACSTVSMQQKITKAMQRRETLETVDSETGEVKTRIPQPWDFFRQEVMIRVFSDSPREELAEKLNSRPEALHDFVSPLFVSRAPNRKMTGQGHLETVKSAKRLSENISVVRKPLTALKLKDIENIVGYPDREPALYQALRERLLAHKDDPVKAFADKPFYKPAKDGGQGSLVKAVRIIENTKHGLKIRNGITDTNGDMVRTDVYQKTDKKGKRQYFIVPVYAWQVEKNELPTVDCKGYEIDDNYEFCFSLYKYDLIEIQNPNDINQELRAYYINCDSSDGRFWLAYHDKSAKEQQFRISTQNQPIIKKYQVDTLGKEIRLCKAEKRTALNGKKKK

SEQ ID NO: 357 - protein, 1426 aa, Niabella soli
  source 1..1426: note = DSM 19437
MPRKNILGLDLGTTSIGFAKIIEDDDYQCSSVELIGVRVNPLTTDEQTNFEKGKPVSVNADRTLKRGMRRNLDRYQLRRDYLIEILRTHHIITADTKLAEDGKNTTHTTYALRALAATAEIPLEAFVRVLLAINKKRGYKSSRKAKNEDEGQLIDGMAIARRLYEESLTPGQFSYQLLKEGKKYLPDFYRSDLNTELNKVWNFQKQFYPEILTDEFKRHLEGKGQRATAVAFWGQHGFSMAENKGSREEKKLHAYKWRSEAAHKQLTKEEVAFVITEINNDLNKSSGYLGAISDRSKELFFNKQTVGQYLHQQLKENPHTRLKGQVFYRQDYLDEFETIWEMQAKFYSALTLELKEEVRDVVIFYQRKLKSQMGLISLCEFESKEIEIEKNGEKAKKRIGLRVAPKSSPLFQEFKIWQVLNNLEFRNKKTKEVFVPEMAAKQQLFDELNIKGNLLASEAIKILGYKTKDWEANYHTLEGNRTNKSLYDAWLKILELEGYDENLLKLSGSDDIDVSKIEKPALEIRQMVLAVFEVLGISGAILDFDAEADGKAFEQQPAYQLWHLLYSAEDDGKKYSQEDIFTYGHDNIGLKKKLCEKFGFRPEHTKILVNVVFSDDYGNLSSKAMRRIYPFIKELTYDKACAEAGYRHSAASLTKEEIAARPLQNRLDLLKKNELRSPVVEKILNQMVNVVNTLVDDENQNRKARGLSEDFHFDEIRIELARELKKNAKERAEMTTNINTAKQSHEKIIRILQTEFGVPNPSRNDIVRYKLYEELKNNGYKDLYTNTYISRDILFSKQIDVDHIIPQMSLFDDSFSNKTVVFRKDNQDKGNKTAYDYILGKYGEQALEEYISRITSLFELGKKNKEEGIGKAKFQKLQKRLVDIGDGFIERDLRESQYIAKKANNMLYAICRSVVSTSGEITARLREDWDLVNVMQEINLPKFRALGLTEMVEKKDGAQKERITDWTKRNDHRHHAMDALAIAFTRHSHIQYLNHLNARKDEANKWHPVVSKIEEKETVLIYDDLGNRKRKFKAPMPNFREVVKEHLENVLISHKAKNKVVTKNKNKIKTVRGEKVKTELTPRGQLHKETIYGRYRYYESKEEKIGPKFDAEMIGMVTNPQYKKLLLERLAANGNDPKKAFWGKNALNKNPLYVDEARQELLPEKILLRWLNDDYSIRKDVTPENLKDIKTIEKILDKGVKKILLKRLADFGNDPKKAFSDLDKNPIWQNEAKRIAIKRVTISGIKNAAPLHHKKDHLGNDILDEKGKQIPSSFVSTGNNHHVAIYRDAEGNLQERVVSLFDAVQLVNGGEPVIDKEYNKGIGWQFLFTMKQNEMFVFPDEKTGFNPREVDLLSSGNRKLISPNLFRVQKLASKNYFFRHHLETSVEEKKELKNIAYKPQLGLNALSNIVKVRINHIGEIVSVGEY

SEQ ID NO: 358 - protein, 1132 aa, Nitratifractor salsuginis
MKKILGVDLGITSFGYAILQETGKDLYRCLDNSVVMRNNPYDEKSGESSQSIRSTQKSMRRLIEKRKKRIRCVAQTMERYGILDYSETMKINDPKNNPIKNRWQLRAVDAWKRPLSPQELFAIFAHMAKHRGYKSIATEDLIYELELELGLNDPEKESEKKADERRQVYNALRHLEELRKKYGGETIAQTIHRAVEAGDLRSYRNHDDYEKMIRREDIEEEIEKVLLRQAELGALGLPEEQVSELIDELKACITDQEMPTIDESLFGKCTFYKDELAAPAYSYLYDLYRLYKKLADLNIDGYEVTQEDREKVIEWVEKKIAQGKNLKKITHKDLRKILGLAPEQKIFGVEDERIVKGKKEPRTFVPFFFLADIAKFKELFASIQKHPDALQIFRELAEILQRSKTPQEALDRLRALMAGKGIDTDDRELLELFKNKRSGTRELSHRYILEALPLFLEGYDEKEVQRILGFDDREDYSRYPKSLRHLHLREGNLFEKEENPINNHAVKSLASWALGLIADLSWRYGPFDEIILETTRDALPEKIRKEIDKAMREREKALDKIIGKYKKEFPSIDKRLARKIQLWERQKGLDLYSGKVINLSQLLDGSADIEHIVPQSLGGLSTDYNTIVTLKSVNAAKGNRLPGDWLAGNPDYRERIGMLSEKGLIDWKKRKNLLAQSLDEIYTENTHSKGIRATSYLEALVAQVLKRYYPFPDPELRKNGIGVRMIPGKVTSKTRSLLGIKSKSRETNFHHAEDALILSTLTRGWQNRLHRMLRDNYGKSEAELKELWKKYMPHIEGLTLADYIDEAFRRFMSKGEESLFYRDMFDTIRSISYWVDKKPLSASSHKETVYSSRHEVPTLRKNILEAFDSLNVIKDRHKLTTEEFMKRYDKEIRQKLWLHRIGNTNDESYRAVEERATQIAQILTRYQLMDAQNDKEIDEKFQQALKELITSPIEVTGKLLRKMRFVYDKLNAMQIDRGLVETDKNMLGIHISKGPNEKLIFRRMDVNNAHELQKERSGILCYLNEMLFIFNKKGLIHYGCLRSYLEKGQGSKYIALFNPRFPANPKAQPSKFTSDSKIKQVGIGSATGIIKAHLDLDGHVRSYEVFGTLPEGSIEWFKEESGYGRVEDDPHH

SEQ ID NO: 359 - protein, 1166 aa, Nitrobacter hamburgensis
MHVEIDFPHFSRGDSHLAMNKNEILRGSSVLYRLGLDLGSNSLGWFVTHLEKRGDRHEPVALGPGGVRIFPDGRDPQSGTSNAVDRRMARGARKRRDRFVERRKELIAALIKYNLLPDDARERRALEVLDPYALRKTALTDTLPAHHVGRALFHLNQRRGFQSNRKTDSKQSEDGAIKQAASRLATDKGNETLGVFFADMHLRKSYEDRQTAIRAELVRLGKDHLTGNARKKIWAKVRKRLFGDEVLPRADAPHGVRARATITGTKASYDYYPTRDMLRDEFNAIWAGQSAHHATITDEARTEIEHIIFYQRPLKPAIVGKCTLDPATRPFKEDPEGYRAPWSHPLAQRFRILSEARNLEIRDTGKGSRRLTKEQSDLVVAALLANREVKFDKLRTLLKLPAEARFNLESDRRAALDGDQTAARLSDKKGFNKAWRGFPPERQIAIVARLEETEDENELIAWLEKECALDGAAAARVANTTLPDGHCRLGLRAIKKIVPIMQDGLDEDGVAGAGYHIAAKRAGYDHAKLPTGEQLGRLPYYGQWLQDAVVGSGDARDQKEKQYGQFPNPTVHIGLGQLRRVVNDLIDKYGPPTEISIEFTRALKLSEQQKAERQREQRRNQDKNKARAEELAKFGRPANPRNLLKMRLWEELAHDPLDRKCVYTGEQISIERLLSDEVDIDHILPVAMTLDDSPANKIICMRYANRHKRKQTPSEAFGSSPTLQGHRYNWDDIAARATGLPRNKRWRFDANAREEFDKRGGFLARQLNETGWLARLAKQYLGAVTDPNQIWVVPGRLTSMLRGKWGLNGLLPSDNYAGVQDKAEEFLASTDDMEFSGVKNRADHRHHAIDGLVTALTDRSLLWKMANAYDEEHEKFVIEPPWPTMRDDLKAALEKMVVSHKPDHGIEGKLHEDSAYGFVKPLDATGLKEEEAGNLVYRKAIESLNENEVDRIRDIQLRTIVRDHVNVEKTKGVALADALRQLQAPSDDYPQFKHGLRHVRILKKEKGDYLVPIANRASGVAYKAYSAGENFCVEVFETAGGKWDGEAVRRFDANKKNAGPKIAHAPQWRDANEGAKLVMRIHKGDLIRLDHEGRARIMVVHRLDAAAGRFKLADHNETGNLDKRHATNNDIDPFRWLMASYNTLKKLAAVPVRVDELGRVWRVMPN

SEQ ID NO: 360 - protein, 1044 aa, Nitrosomonas sp.
  source 1..1044: note = AL212
MLHKMRYRLALDLGSTSLGWAMVRLNANQQPCAVIKAGVRIFSNGRNPKDGSSLAVTRREARSMRRRRDRLLKRKARMMRTLIEYGFFPANETQRKALENLNPYALRAKGLDEALTPSEFARALFHINQRRGFKSNRKTDKKDSDSGALKTAIKQLHSVLDPQGNDGKPRTVGELLYKRFTDLSKLPKDRTVRARYRQDKIVKDDGKTKIDKYYDLYIDRAMIEQEFDALWKKQSELNPILFTENARADLKDVLLYQRSLKPVKPGRCTFMSEEERAPLALPSTQRFRMYQEVNNLRILREGLKEESLTLQQRDDLINALEKNNRRTFTQIKKLLGVGGSVQFNFEDPKREELKGNTTSAILGKSEHFGEAWFAFNEAKQDAIVLQLIKEENEAKLVRWLQDETGIDEKRAEVIANAGLPEGYGSLCIEALARILPELRRDVVTYDKAVQAAGFEHHSKLNRNEEIPDITFKIESIDRNSGEIKQFHLHKELPYYGEYLQRHVGFGSGKPEDSIEKRYGKIANPTVHIGLNQVRVVVNALIKRYGHPSEIIVEVARDLKQSKDRRDEENKRQAENQKRNERLRKDIADILGISEERVRRDDIEKMILWEELSFDPADRRCPYSGVQVSTVMLLSDEVEVEHILPFSQTLDDSLNNKTVALRQANRIKGNRTPWEAFGTSNISGFDYSGILTRAELMPKAKRYRFAEDGYQRWLKDDAGFLARALNDTRHLSKIAREYMSLICPNTRVIPGQMTAMLRRNFGLNDVLGLNGEKNRNDHRHHAVDACVIAVTDQGLLQRFAAASASARERQLNRLVENMPLPWESYREHVRRAIDGIWVSHRPDHSHEGAMHNDTAYGLRGNGRVSFHKMVEGKREYIEDNLKVIEITDTKAIDRHGLLPTGKPRPYKGYKGDSNYCIEIVRNEKGRWEGEIISTFDAYQLVRKYGIVQLRYPVLSVSGKPLVMRLIRNDFVRLEHEGITRTLRVCKMREDGQVALADVTEANVDARTRTKEICYVFKTGGSLQKAKARRITISPIGELRDPGFKE

SEQ ID NO: 361 - protein, 1498 aa, Odoribacter laneus
  source 1..1498: note = YIT 12061
METTLGIDLGTNSIGLALVDQEEHQILYSGVRIFPEGINKDTIGLGEKEESRNATRRAKRQMRRQYFRKKLRKAKLLELLIAYDMCPLKPEDVRRWKNWDKQQKSTVRQFPDTPAFREWLKQNPYELRKQAVTEDVTRPELGRILYQMIQRRGFLSSRKGKEEGKIFTGKDRMVGIDETRKNLQKQTLGAYLYDIAPKNGEKYRFRTERVRARYTLRDMYIREFEIIWQRQAGHLGLAHEQATRKKNIFLEGSATNVRNSKLITHLQAKYGRGHVLIEDTRITVTFQLPLKEVLGGKIEIEEEQLKFKSNESVLFWQRPLRSQKSLLSKCVFEGRNFYDPVHQKWIIAGPTPAPLSHPEFEEFRAYQFINNIIYGKNEHLTAIQREAVFELMCTESKDFNFEKIPKHLKLFEKFNFDDTTKVPACTTISQLRKLFPHPVWEEKREEIWHCFYFYDDNTLLFEKLQKDYALQTNDLEKIKKIRLSESYGNVSLKAIRRINPYLKKGYAYSTAVLLGGIRNSFGKRFEYFKEYEPEIEKAVCRILKEKNAEGEVIRKIKDYLVHNRFGFAKNDRAFQKLYHHSQAITTQAQKERLPETGNLRNPIVQQGLNELRRTVNKLLATCREKYGPSFKFDHIHVEMGRELRSSKTEREKQSRQIRENEKKNEAAKVKLAEYGLKAYRDNIQKYLLYKEIEEKGGTVCCPYTGKTLNISHTLGSDNSVQIEHIIPYSISLDDSLANKTLCDATFNREKGELTPYDFYQKDPSPEKWGASSWEEIEDRAFRLLPYAKAQRFIRRKPQESNEFISRQLNDTRYISKKAVEYLSAICSDVKAFPGQLTAELRHLWGLNNILQSAPDITFPLPVSATENHREYYVITNEQNEVIRLFPKQGETPRTEKGELLLTGEVERKVFRCKGMQEFQTDVSDGKYWRRIKLSSSVTWSPLFAPKPISADGQIVLKGRIEKGVFVCNQLKQKLKTGLPDGSYWISLPVISQTFKEGESVNNSKLTSQQVQLFGRVREGIFRCHNYQCPASGADGNFWCTLDTDTAQPAFTPIKNAPPGVGGGQIILTGDVDDKGIFHADDDLHYELPASLPKGKYYGIFTVESCDPTLIPIELSAPKTSKGENLIEGNIWVDEHTGEVRFDPKKNREDQRHHAIDAIVIALSSQSLFQRLSTYNARRENKKRGLDSTEHFPSPWPGFAQDVRQSVVPLLVSYKQNPKTLCKISKTLYKDGKKIHSCGNAVRGQLHKETVYGQRTAPGATEKSYHIRKDIRELKTSKHIGKVVDITIRQMLLKHLQENYHIDITQEFNIPSNAFFKEGVYRIFLPNKHGEPVPIKKIRMKEELGNAERLKDNINQYVNPRNNHHVMIYQDADGNLKEEIVSFWSVIERQNQGQPIYQLPREGRNIVSILQINDTFLIGLKEEEPEVYRNDLSTLSKHLYRVQKLSGMYYTFRHHLASTLNNEREEFRIQSLEAWKRANPVKVQIDEIGRITFLNGPLC

SEQ ID NO: 362 - protein, 1389 aa, Oenococcus kitaharae
  source 1..1389: note = DSM 17330
MARDYSVGLDIGTSSVGWAAIDNKYHLIRAKSKNLIGVRLFDSAVTAEKRRGYRTTRRRLSRRHWRLRLLNDIFAGPLTDFGDENFLARLKYSWVHPQDQSNQAHFAAGLLFDSKEQDKDFYRKYPTIYHLRLALMNDDQKHDLREVYLAIHHLVKYRGHFLIEGDVKADSAFDVHTFADAIQRYAESNNSDENLLGKIDEKKLSAALTDKHGSKSQRAETAETAFDILDLQSKKQIQAILKSVVGNQANLMAIFGLDSSAISKDEQKNYKFSFDDADIDEKIADSEALLSDTEFEFLCDLKAAFDGLTLKMLLGDDKTVSAAMVRRFNEHQKDWEYIKSHIRNAKNAGNGLYEKSKKFDGINAAYLALQSDNEDDRKKAKKIFQDEISSADIPDDVKADFLKKIDDDQFLPIQRTKNNGTIPHQLHRNELEQIIEKQGIYYPFLKDTYQENSHELNKITALINFRVPYYVGPLVEEEQKIADDGKNIPDPTNHWMVRKSNDTITPWNLSQVVDLDKSGRRFIERLTGTDTYLIGEPTLPKNSLLYQKFDVLQELNNIRVSGRRLDIRAKQDAFEHLFKVQKTVSATNLKDFLVQAGYISEDTQIEGLADVNGKNFNNALTTYNYLVSVLGREFVENPSNEELLEEITELQTVFEDKKVLRRQLDQLDGLSDHNREKLSRKHYTGWGRISKKLLTTKIVQNADKIDNQTFDVPRMNQSIIDTLYNTKMNLMEIINNAEDDFGVRAWIDKQNTTDGDEQDVYSLIDELAGPKEIKRGIVQSFRILDDITKAVGYAPKRVYLEFARKTQESHLTNSRKNQLSTLLKNAGLSELVTQVSQYDAAALQNDRLYLYFLQQGKDMYSGEKLNLDNLSNYDIDHIIPQAYTKDNSLDNRVLVSNITNRRKSDSSNYLPALIDKMRPFWSVLSKQGLLSKHKFANLTRTRDFDDMEKERFIARSLVETRQIIKNVASLIDSHFGGETKAVAIRSSLTADMRRYVDIPKNRDINDYHHAFDALLFSTVGQYTENSGLMKKGQLSDSAGNQYNRYIKEWIHAARLNAQSQRVNPFGFVVGSMRNAAPGKLNPETGEITPEENADWSIADLDYLHKVMNFRKITVTRRLKDQKGQLYDESRYPSVLHDAKSKASINFDKHKPVDLYGGFSSAKPAYAALIKFKNKFRLVNVLRQWTYSDKNSEDYILEQIRGKYPKAEMVLSHIPYGQLVKKDGALVTISSATELHNFEQLWLPLADYKLINTLLKTKEDNLVDILHNRLDLPEMTIESAFYKAFDSILSFAFNRYALHQNALVKLQAHRDDFNALNYEDKQQTLERILDALHASPASSDLKKINLSSGFGRLFSPSHFTLADTDEFIFQSVTGLFSTQKTVAQLYQETK

SEQ ID NO: 363 - protein, 1389 aa, Oenococcus kitaharae; identical to SEQ ID NO: 362
  source 1..1389: note = DSM 17330

SEQ ID NO: 364 - protein, 1399 aa, Olsenella uli
MNLRNTTDEYNIGLDMGTNSVGWAVTDKAGAIAHFKGKPTLGSRLFDAAQTAAGARIHRSQRRRYVRRRWRLDLLQSLFQDEVSKVDSEFFCRLRQSRLYVGDREKGHADYTWPIFNDSDFNEVDYYKRFPTIYHLRKWLMETDEKADIRLIYLATHNIVKHRGNFLRENNKSLSSRDANPAQAVKSLRLALNDWCSERDYECAWKGEEDDGAIDEAILNVLADGEKGRSDQAKEIAKLTGVDCGDAKQSKQCNEAIAKAIVGLKVEMKNIFGEFPAEKTSYIYLSSDEDVEAVRESCPDDSGELFQALCKLYSAYILQELLSYADPSGQTISANMVAKYKQYGRDLRLLKELTRTYAPQKYDLFFRGETYAGSSDYVVDEARGYTRYNLGTTKANYDDFQKSVKELFKGTDALQDERYQEMMVAFGEQKFLRRLKTSDNGSIYYQLHLEELHTILENQGKHYPFLLSEEDKIESLVSFRIPYYVGPLTRKNAAIGHDGKERFAWSSRKDGMEHAVITPWNWEEIIDRDKSAEDFIMRMTGDCTYLQGEPVLPKCSLLYEEFCALNEFNGAHWTVDGDDERRFDAAQRERIMCDLFRRTRSVTYNKVSDWLERKYNFTGARVRGGQGEHGFESKLGSYIFFCKDVFKTDGLDEADYTMIEQIILWSTLFEDRDILKRKIEEAYGGDRLTSEQIKVICKKRFTGWGRLSKRLLTDIKVNTDTGRKSIMDVLREGNPNNGQRSRTMVFMEVLRDEDLGFQKAIDGLNRDYFREHNNGLMDVNDLPGSPAIRRSINQAVRIVDEIASIARKEPTNIFIEVTREEDDPRKKGKRTKRRYDAIKSALEKFKKDDPSLWKELCEKAPGDMDERLSLYFMQRGKCMYSGRPIKIEELHTGKYEVDHIIPRSYIKDDSFENKVLVYREENQHKTDALLIDSSIRQKMGGYWRMLHDAKLVGDKKFRNLFRNHIDDKAMKGFVARQIVETSQMVKLVQTLFEARYPNTRIVPVKAGISHDLREAAGLVKCREANDFHHAHDAFLACRIGLFIQKRHPSVYDNPIGLARIMRDYARMQAREYKKSHCLAHTQGFIVNSFLSSGFDEETGEIFKDDWDAKAEVEGIRRVLNCRQCFISRMPVEGDTRYGGRYWGETIYSPKGKHKHEIPLKQGLDPNLYGGYSDLLYSYFLIYEASDVSSGERVLRFIGIPTSIAARMANQKRLEEYVSRLALQENLEHVRMVRKIMKKQLIEVDNCRLLVTAADAVTNATELAFSLDEMKIISTCAKCINGADPSAIDKIGNAQDSFFDNLKRRGSDRCALLFSQLKLDKLSQNFYMISSDDKSKILISILDRIRAKSNSVDLSLVGGAKHAAQMKFDFNAKLNNPASSFVLIDQSVTGMFERRTRIGL

SEQ ID NO: 365 - protein, 1535 aa, Ornithobacterium rhinotracheale
MNTILGLDLGTNSIGWALIKVLNDKTRLPLEIIDLGVVVIPTDQRTLDKFSKGESISKTAERTKQKGVRKLYERKKLRRERLHRVLNILGFLPEHYSKKIDFKKHLGQFFGNSQPKISYVENDHGKHEFIFMDSYREMLKEFSKHNIKNVPYDWTIYYLRKKALSQKISKEELAWVILNFNKKRGYYQFRDDNADENKENKIEKYYALKVTNVKKEDAQNYTITLENGWIYKNKSKISLLDWVGSTKEFISTEKFDNKGNIIKKKNGEDDRTLKLVDSEKDWIAIKKSTEDRIENYGKTVGTYLYEHLLKDPNQKLNGELINIIDRKFYKNELKQILEKQKEFHPELLNEDLFQKSIIELYPKNSTRQKELKNKDLCYLLIDDVIYYQRDLKKKNSTINKCSFESREYYLNGEKQIQKINCIAKSKPLYQEFRTLQFIKNLKVYEIIDGLEKDITSKLLPDFETKEHFFEWLNDKEKIDQLQLLSYKCFDLHDNVKNDLIAKGIKRPTEKAIRTELLEKYRWNYSKDNDRNFLLNETRFKILKYLKKVDKKLTLTNEQIESLWLLLYSAKDERELKNGLQKFSEKNKLPKKFSDIFISFPPFKKEYGAYSEKALKKLLSLVRFGKYWSFNKIDNNIQNKIMNILNGEVDDSISDRVREKTILLQDKNDFQDLPLWLASYVAYNRFSEVSEIKYWDSPDKIEFLKQHSIGNPIVEKIINETLKLIKDIWVIHGKSCKNFFSEIHIELSREIKSSSKKRAQITNNNTKNQKLNNLIKSLLIEMASDTKYENVTPYSPSQQEILKIYDEGIYSKEENSEKIKEINKIRNNNKISKSDITKYKLWLEQGYISPYTGKIIPLTKLFTAKYQKEHIIPQTKFFDDSFNNKVICEAEVNKLKDNSLAMNFIKAKGGKAVKLSDGETVTILNQEEYKQLVRTSFKKNSIKLRNLLLEEIPDTFTKRQLNDTKYISKLVLSLLSNIVREKGELESTAKRIVSTNGQITSILRNDWGLNNIWNKLITPRFERLNNINKNKIYGNWENKKGKNVFQINYLNDNLSTLNTKRIDHRHHALDALIVACTTRNHINFLNNQYAKSRNQRHDLRAKLKRRETITTEGSKKQVFKDFIKPWESFTQDALKKLETTIVNFKVNKRIINKTINWYKKWEKQKDGTYKKIQKKQTKGDAWAIRKPLHIDTIYGIVCKKLPLKSALENYKNIIDENLKHKIKELKEVNKFDNNQIINFFKECNFIFEDNNIQKVEVYDFKDNRDKTILSSSRQLIDESFTPKKIGKVLDPTIRNILLKHLNSTKYNNKFDSDGNPIKPEKLAFSPEGLKDLNKNIKHLNNNKEHQPIKRVKLFETLGNKIKVGYTQQKNKKFAETATGTNLFLGIYSDNNKRDFKTIPLILAIQREKEGLNPCPDTDEKGNQLLFSLSPNELVFVPNNEERKNPNLVDFENLSKDQIDRIYKFVSCTGSEAYFVPSRTAKPIIENENGTNNKSQRIIEFNEKTSIKNEKNEPVLIKTICWKIEVNRLGKIIKVIK

SEQ ID NO: 366 - protein, 1443 aa, Parabacteroides johnsonii
  source 1..1443: note = DSM 18315
MIKLLYLEKLKQYTMKKILGLDLGTSSIGWALVNEAENSDEVSSIIKLGVRVNPLTVDEMQNFEKGKSITTNADRTLKRSMRRNLQRYKLRRDALIELLKKVGFITDKTILSEQGNRTTFETYRLRAKAAEEEISLKELARVLLMINKKRGYKSSRKAKGEEEGALIDGMEIAKKLYDEDLTPGQLCLQLLESGKKFFPDFYRSDLQEEFNKIWDFQKQFNLFSFCDVAKEEVKGKNKSQTWAILAKYFVETKKVNVWNEHEAQTENREEVYKLVGLKRTVKGEELKKENYRWRVQALTEQLDLEKIAVVLQEINGQISASSGYLGAISDRSKVLYFNRQTVGQYQMAELNKNPNMSLRNMVFYRQDYLDEFNVIWEKQAEFHKELTPELKKEIRDIIIFYQRRLKSQKGLISFCEFENREVVVEKEGKKQTKIIGCKVIPRSHPLFQEFKIWQTLNNIEVFVGEKKGKRKKSNVSSDLFGDTEDALITEGRRFLYQEEKKILAKELSIKKGLTKAEILRLLFENPQELDINFKQIDGNQTGFALFSAYSNMIEKYGYEPLDFKKPAEDLISQLKTVFTDLGWNTDLLFIDLDKENKEWEKQPYFRLWHLLYSFEGDNTPTGNGKLIEKIMQLCGIEKEYAIELANVSLQDDYGSLSAKAIKKILLYLKEGNQYDMACEYAGYRHSKSSLTKEEIENKVLKDKLEILPKNSLRNPVVEKILNQMVNVINTVMEVYGRPDEIRVELARELKKSAKEREELTKAVAKNTREHEEIRKVLQSEFGMINVSRNDIIRYKLYEELKDNGYKTLYSNQYIPREKLFSKEIDIEHIIPQSRLFDDSLSNKTLEYKSINIEKGNKTAYDFVKEKYGEEGLQQYLNRCENLCKDKKAKLRKLKMELNEIPDGFIDRDLRNTQYIAKKALSMLTEICRRVVATTGSITDKLREDWQLVDVMKELNLPKYEALGLVEVYEDKDGRKIKRIKDWTKRNDHRHHAMDALTVAFTKDVFIQYFNNKNAAWESDSKEHTNIVGIKTRYFESGKAVPPIPLGQFRVEAKCHLENLLVSIKAKNKVVTTNVNCIKKKGGTYKNTQQTPRGQLHLETIYGSHNQYVTKIEKVNASFDAVKIATVSKQDYRNALLKRLEVFGNDPKKAFTGKNSLEKNPIYLDRAQTIQVPDKVQTVELETAYTIRKPVDPTLNVDKVVDKKIRLILEQRLKEYGGDAKKAFVNLDENPIWLNEEKGISIKRVTIRGISKAQALHDKKDKDGNFILDETGKRIPVDFVNTGNNHHVAIYRKPVLDKKGQVIFDDEGNPMYELDEDVVPFFEAVTRANLGIPIIDKDYKKSEGWQFLFSMKQNEYFVFPNEKTGFNPKEVDLLDPDNYAMISPNLFRVQKIGLNDYTFRHHLETTIQNDLKFITWIRCGKSGIKDIVKVRINHIGQIVSVGEY

SEQ ID NO: 367 - protein, 1424 aa, Parabacteroides sp.
  source 1..1424: note = D13
MKRILGLDLGTNSIGWALVNEAETDEEVSSIIRLGVRVNPLTVDETQNFEKGKSITTNAERTLKRSMRRNLQRYKLRRDALVEFLKELGFITDETILSEQGNRTTFETCRLRAKAAEEEISLEELSRVLLMINKKRGYKSSRKVKKEEDGVLIDGMEIAKKLYEEDLTPGQLCSQLLESGKKVLPDFYRSDLQEELDRIWSVQKQFHPDVFCDAAKEEIKGKNRSQTWAILANYFVWKEEVVGWNDREAKNETIEKECKLVGLKRTTKGYELKKENYRWRAQALTEQLGLEEIAVVLQEINGQINASSGYLGAISDRSKVLYFNHQTVGQYQMAELDKNPHASLRNMVFYRQDYLDEFDRIWEKQAEFHKELTAELKKEIRDMIIFYQRRLKSQKGLISFCEFERLEIVVEKDGKKQTKVIGCKVIPRSHPLFQEFKVWQTLNDIKVLGREKKRNALSASESRALYPEEKEILARELAIKENMKKADVLKLLFENPQELDLNFKQIDGNRTGFSLFSAYSKMIEKYGYEPLDFKKPADEIIGQLRTIFTDLGWNTNLFTIDLTKEGKELEMQPYFRLWHLLYSFEGDNTSTGNGKLIEKIMQLCGVEKEYAVELASLSFQDDYGSLSAKAIKRILPYLKEGNLYDVACEYAGYRHSKSSLTKEEIENKVLKGKLEVLPKNSLRNPVVEKILSQMVNVINTIIDTYGKPDEIRVELARELKKSAKEREELTKAIAKSTREHEEIRKLLQDEFGMMNVSRNDIIRYKLYEELKDNGYKTLYSNQYIPKEKIFSKEIDIEHIIPQSRLFDDSLSNKTLEYKAINIEKGNKTAYDFVKEKYGEEGLQQYINRCESLFNDKKAKLRKLKMEQKDIPDGFIDRDLRNTQYIAKKALAMLNEICRRVVATTGSITDQLREDWQLVDVMKELNLPKYEALGFVETYEDKDGRKIKRIKDWTKRNDHRHHAMDALTVAFTKDAFIQYFNNKNAAQDSGNRNHTNIIGIKTRYFDKGRALPPIPLEQFRIEAKQHLEKLLVSIKAKNKVVTVNVNRTKKRKGENTKIQQTPRGQLHLETVYGSHKQYVTKIEKVNASFDAAKIATVSKRAYRNALLKRLETFGNDPKKAFTGKNALEKNPLYADKYQTIRVPEKVQTVEFETIYTIRKPVDPALNVDKVVDVKVRAILERRLKEYGGDPKKAFVNFWENPIWLNKEKGISIKRVSIRGINNAQSIHVKKDKNGNPIWDENGKQIPVDFVNTGNNHHVAIYRKPVLDKKGQVTFDEDGNLMYELDEVVVPFFEAVTRANLGLPIIDKDYRKSEGWQFLFSMKQNEYFVFPNEKTGFNPKEVDLLNPDNYAMISPNLFRVQTMSKVMYGNNVVRDYKFRHHLETTVKDMKELKDIAYKQYKTLSFGNSVVKIRINHIGQIVSVGEY

SEQ ID NO: 368 - protein, 1428 aa, Parasutterella excrementihominis
  source 1..1428: note = YIT 11859
MGKTHIIGVGLDLGGTYTGTFITSHPSDEAEHRDHSSAFTVVNSEKLSFSSKSRTAVRHRVRSYKGFDLRRRLLLLVAEYQLLQKKQTLAPEERENLRIALSGYLKRRGYARTEAETDTSVLESLDPSVFSSAPSFTNFFNDSEPLNIQWEAIANSPETTKALNKELSGQKEADFKKYIKTSFPEYSAKEILANYVEGRRAILDASKYIANLQSLGHKHRSKYLSDILQDMKRDSRITRLSEAFGSTDNLWRIIGNISNLQERAVRWYFNDAKFEQGQEQLDAVKLKNVLVRALKYLRSDDKEWSASQKQIIQSLEQSGDVLDVLAGLDPDRTIPPYEDQNNRRPPEDQTLYLNPKALSSEYGEKWKSWANKFAGAYPLLTEDLTEILKNTDRKSRIKIRSDVLPDSDYRLAYILQRAFDRSIALDECSIRRTAEDFENGVVIKNEKLEDVLSGHQLEEFLEFANRYYQETAKAKNGLWFPENALLERADLHPPMKNKILNVIVGQALGVSPAEGTDFIEEIWNSKVKGRSTVRSICNAIENERKTYGPYFSEDYKFVKTALKEGKTEKELSKKFAAVIKVLKMVSEVVPFIGKELRLSDEAQSKFDNLYSLAQLYNLIETERNGFSKVSLAAHLENAWRMTMTDGSAQCCRLPADCVRPFDGFIRKAIDRNSWEVAKRIAEEVKKSVDFTNGTVKIPVAIEANSFNFTASLTDLKYIQLKEQKLKKKLEDIQRNEENQEKRWLSKEERIRADSHGICAYTGRPLDDVGEIDHIIPRSLTLKKSESIYNSEVNLIFVSAQGNQEKKNNIYLLSNLAKNYLAAVFGTSDLSQITNEIESTVLQLKAAGRLGYFDLLSEKERACARHALFLNSDSEARRAVIDVLGSRRKASVNGTQAWFVRSIFSKVRQALAAWTQETGNELIFDAISVPAADSSEMRKRFAEYRPEFRKPKVQPVASHSIDAMCIYLAACSDPFKTKRMGSQLAIYEPINFDNLFTGSCQVIQNTPRNFSDKTNIANSPIFKETIYAERFLDIIVSRGEIFIGYPSNMPFEEKPNRISIGGKDPFSILSVLGAYLDKAPSSEKEKLTIYRVVKNKAFELFSKVAGSKFTAEEDKAAKILEALHFVTVKQDVAATVSDLIKSKKELSKDSIENLAKQKGCLKKVEYSSKEFKFKGSLIIPAAVEWGKVLWNVFKENTAEELKDENALRKALEAAWPSSFGTRNLHSKAKRVFSLPVVATQSGAVRIRRKTAFGDFVYQSQDTNNLYSSFPVKNGKLDWSSPIIHPALQNRNLTAYGYRFVDHDRSISMSEFREVYNKDDLMRIELAQGTSSRRYLRVEMPGEKFLAWFGENSISLGSSFKFSVSEVFDNKIYTENAEFTKFLPKPREDNKHNGTIFFELVGPRVIFNYIVGGAASSLKEIFSEAGKERS

SEQ ID NO: 369 - protein, 1037 aa, Parvibaculum lavamentivorans
MERIFGFDIGTTSIGFSVIDYSSTQSAGNIQRLGVRIFPEARDPDGTPLNQQRRQKRMMRRQLRRRRIRRKALNETLHEAGFLPAYGSADWPVVMADEPYELRRRGLEEGLSAYEFGRAIYHLAQHRHFKGRELEESDTPDPDVDDEKEAANERAATLKALKNEQTTLGAWLARRPPSDRKRGIHAHRNVVAEEFERLWEVQSKFHPALKSEEMRARISDTIFAQRPVFWRKNTLGECRFMPGEPLCPKGSWLSQQRRMLEKLNNLAIAGGNARPLDAEERDAILSKLQQQASMSWPGVRSALKALYKQRGEPGAEKSLKFNLELGGESKLLGNALEAKLADMFGPDWPAHPRKQEIRHAVHERLWAADYGETPDKKRVIILSEKDRKAHREAAANSFVADFGITGEQAAQLQALKLPTGWEPYSIPALNLFLAELEKGERFGALVNGPDWEGWRRTNFPHRNQPTGEILDKLPSPASKEERERISQLRNPTVVRTQNELRKVVNNLIGLYGKPDRIRIEVGRDVGKSKREREEIQSGIRRNEKQRKKATEDLIKNGIANPSRDDVEKWILWKEGQERCPYTGDQIGFNALFREGRYEVEHIWPRSRSFDNSPRNKTLCRKDVNIEKGNRMPFEAFGHDEDRWSAIQIRLQGMVSAKGGTGMSPGKVKRFLAKTMPEDFAARQLNDTRYAAKQILAQLKRLWPDMGPEAPVKVEAVTGQVTAQLRKLWTLNNILADDGEKTRADHRHHAIDALTVACTHPGMTNKLSRYWQLRDDPRAEKPALTPPWDTIRADAEKAVSEIVVSHRVRKKVSGPLHKETTYGDTGTDIKTKSGTYRQFVTRKKIESLSKGELDEIRDPRIKEIVAAHVAGRGGDPKKAFPPYPCVSPGGPEIRKVRLTSKQQLNLMAQTGNGYADLGSNHHIAIYRLPDGKADFEIVSLFDASRRLAQRNPIVQRTRADGASFVMSLAAGEAIMIPEGSKKGIWIVQGVWASGQVVLERDTDADHSTTTRPMPNPILKDDAKKVSIDPIGRVRPSND

SEQ ID NO: 370 - protein, 1058 aa, Pasteurella multocida
  source 1..1058: note = subsp. gallicida X73
MQTTNLSYILGLDLGIASVGWAVVEINENEDPIGLIDVGVRIFERAEVPKTGESLALSRRLARSTRRLIRRRAHRLLLAKRFLKREGILSTTDLEKGLPNQAWELRVAGLERRLSAIEWGAVLLHLIKHRGYLSKRKNESQTNNKELGALLSGVAQNHQLLQSDDYRTPAELALKKFAKEEGHIRNQRGAYTHTFNRLDLLAELNLLFAQQHQFGNPHCKEHIQQYMTELLMWQKPALSGEAILKMLGKCTHEKNEFKAAKHTYSAERFVWLTKLNNLRILEDGAERALNEEERQLLINHPYEKSKLTYAQVRKLLGLSEQAIFKHLRYSKESAESATFMELKAWHAIRKALENQGLKDTWQDLAKKPDLLDEIGTAFSLYKTDEDIQQYLEGKLPDSVINALLVSLNFDKFIELSLKSLRKILPLMEQGKRYDQACHEIYGHHYGEKNQQISQLLPVIPTQEIRNPVVLRTLSQARKVINAIIRQYGSPARVHIETGRELGKSFKERREIQKQQEDNRTKRESAVQKFKELFSDFSSEPKSKDILKFRLYEQQHGKCLYSGKEINIHRLNEKGYVEIDHALPFSRTWDDSFNNKVLVLASENQNKGNQTPYEWLQGKINSERWKNFVALVLGSQCSAAKKQRLLTQVIDDNKFIDRNLNDTRYIARFLSNYIQENLLLVGKNKKNVFTPNGQITALLRSRWGLIKVRENNDRHHALDAIVVACATPSMQQKITRFIRFKEVHPYKIENRYEMVDQESGEIISPHFPEPWAYFRQEVNIRVFDNHPDTVLKEMLPDRPQANHQFVQPLFVSRAPTRKMSGQGHMETIKSAKRLAEGISVLRIPLTQLKPNLLENMVNKEREPALYVGLKARLAEFNQDPAKAFATPFYKQGGQQVKAIRVELVQKSGVLVRQGNGVADNAPGSIVRTDVFIKNNKFFLVPIYTWQVAKGILPNKAIVAHKNEDEWEEMDEGAKFKFSIFPNDLIELRTKTECFLGYYIGPDRHNGSISLREHDSEISKGNAGVYRVGVKLALSLEKYHIDELGKNRRICRPHQRRPVR

SEQ ID NO: 371 - protein, 1056 aa, Pasteurella multocida
  source 1..1056: note = subsp. multocida str. P52VAC
MQTTNLSYILGLDLGIASVGWAVVEINENEDPIGLIDVGVRIFERAEVPKTGESLALSRRLARSTRRLIRRRARRLLLAKRFLKREGILSTTDLEKGLPNQAWELRVAGLERRLSAIEWGAVLLHLIKHRGYLSKRKNESQTNNKELGALLSGVAQNHQLLQSDDYRTPAELALKKFAKEEGHIRNQRGAYTHTFNRLDLLAELNLLFAQQHQFGNPHCKEHIQQYMTELLMWQKPALSGEAILKMLGKCTHEKNEFKAAKHTYSAERFVWLTKLNNLRILEDGAERALNEEERQLLINHPYEKSKLTYAQVRKLLGLSEQAIFKHLRYSKENAESATFMELKAWHAIRKALENQGLKDTWQDLAKKPDLLDEIGTAFSLYKTDEDIQQYLTNKVPNSVINALLVFLNFDKFIELALKSLRKILPLMEQGKRYDQACREIYGHHYGEANQKTSQLLPAIPAQEIRNPVVLRTLSQARKVINAIIRQYGSPARVHIETGRELGKSFKERREIQKQQEDNRTKRESAVQKFKELFSDFSSEPKSKDILKFRLYEQQHGKCLYSGKEINIHRLNEKGYVEIDHALPFSRTWDDSFNNKVLVLASENQNKGNQTPYEWLQGKINSERWKNFVALVLGSQCSAAKKQRLLTQVIDDNKFIDRNLNDTRYIARFLSNYIQENLLLVGKNKKNVFTPNGQITALLRSRWGLIKIRENNDRHHALDAIVVACATPSMQQKITRFIRFKEVHPYKIENRYEMVDQESGEIISPHFPEPWAYFRQEVNIRVFDNHPDTVLKEMLPDRPQANHQFVQPLFVSRAPTRKMSGQGHMETIKSAKRLAEGISVLRIPLTQLKPNLLENMVNKEREPALYAGLKARLAEFNQDPAKAFTTPFYKQGGQQVKAIRVEQVQKSGVLVRENNGVADNASIVRTDVFIKNNKFFLVPIYTWQVAKGILPNKAIVAHKNEDEWEEMDEGAKFKFSLFPNDLVELKTKKEYFFGYYIGLDRATGNISLKEHDGEISKGKDGVYRVGVKLALSFEKYQVDELGKNRQICRPQQRQPVR

SEQ ID NO: 372 - protein, 1056 aa, Pasteurella multocida
MQTTNLSYILGLDLGIASVGWAVVEINENEDPIGLIDVGVRIFERAEVPKTGESLALSRRLARSTRRLIRRRAHRLLLAKRFLKREGILSTIDLEKGLPNQAWELRVAGLERRLSAIEWGAVLLHLIKHRGYLSKRKNESQTNNKELGALLSGVAQNHQLLQSDDYRTPAELALKKFAKEEGHIRNQRGAYTHTFNRLDLLAELNLLFAQQHQFGNPHCKEHIQQYMTELLMWQKPALSGEAILKMLGKCTHEKNEFKAAKHTYSAERFVWLTKLNNLRILEDGAERALNEEERQLLINHPYEKSKLTYAQVRKLLGLSEQAIFKHLRYSKENAESATFMELKAWHAIRKALENQGLKDTWQDLAKKPDLLDEIGTAFSLYKTDEDIQQYLTNKVPNSVINALLVSLNFDKFIELSLKSLRKILPLMEQGKRYDQACREIYGHHYGEANQKTSQLLPAIPAQEIRNPVVLRTLSQARKVINAIIRQYGSPARVHIETGRELGKSFKERREIQKQQEDNRTKRESAVQKFKELFSDFSSEPKSKDILKFRLYEQQHGKCLYSGKEINIHRLNEKGYVEIDHALPFSRTWDDSFNNKVLVLASENQNKGNQTPYEWLQGKINSERWKNFVALVLGSQCSAAKKQRLLTQVIDDNKFIDRNLNDTRYIARFLSNYIQENLLLVGKNKKNVFTPNGQITALLRSRWGLIKARENNNRHHALDAIVVACATPSMQQKITRFIRFKEVHPYKIENRYEMVDQESGEIISPHFPEPWAYFRQEVNIRVFDNHPDTVLKEMLPDRPQANHQFVQPLFVSRAPTRKMSGQGHMETIKSAKRLAEGISVLRIPLTQLKPNLLENMVNKEREPALYAGLKARLAEFNQDPAKAFATPFYKQGGQQVKAIRVEQVQKSGVLVRENNGVADNASIVRTDVFIKNNKFFLVPIYTWQVAKGILPNKAIVAHKNEDEWEEMDEGAKFKFSLFPNDLVELKTKKEYFFGYYIGLDRATGNISLKEHDGEISKGKDGVYRVGVKLALSFEKYQVDELGKNRQICRPQQRQPVR

SEQ ID NO: 373 - protein, 1364 aa, Pediococcus acidilactici
  source 1..1364: note = DSM 20284
MGDRKYNLGLDIGTSSIGFAAVDENNQPIRVKGKTAIGVRLFEEGKTAADRRGFRTTRRRLSRRRWRINLLNEIFDAHLAEVDPTFLARLKESNRSNLDPKKSFQGSLLFPERKDYQFYEEYPTIYHLRKALMEKDRKFDFREIYLAVHHIIKYRGNFLNGTPMRSFKVENIELDTLFDQLNQLYAEIVPDNELAFDLAQVADVKDVLSSTTIYKMDKKKQLVKMMLLPASNKALQSENKKIVTQFVNAILNYKFKLDVLLQVETDADWSLKLNDEGADDKLEEFTGDLDENRLEIIDLLQRLHNWFSLNEITKDGNSLSAAMVEKYENHHHHLGLLKKVIENHPDAKKAKALKETYTAYVGKTDDKTQNQDDFYKAVEKNLDDSPDAKEIKRLIQLDQFMPKQRTGQNGAIPHQLHQQELDQIIEKQSKYYPFLAEPNPNVKRRKDAPYKLDELIAFKIPYYVGPLVTPEEQAQNGENVFAWMKRKAAGPITPWNFDEKVDRMESANRFIRRMTTKDTYLFGEDVLPAESMIYQKFVVLNELNNLKINGRHLSLKDKQDVYNDLFKQQKTVSIKALQNYYVTKKKAATAPTVGGLADPKKFLSSLSTYIDFKNMFGERVNDPQFQEDLEQIVEWSTIFEDRGIFKAKLQALGWLSEKQIQQLVAKRYKGWGRLSKKLLTGLKNAEGYSILDEMWRSTGNFMQIQSRPEFAALIQQANEKQFEGNDPDNVWENIENILGDAYTSPQNKKAIRQVVKVVQDIEKAVGNPPEKIAIEFTREAAANPQRTQSRLRTLEKLYESAEEVVDAGLTAELAEFKENKHVLSDKYYLYFTQLGRDVYTGDTISLDKLNDYDVDHILPQSFIKDDSLDNRVLTIRAVNNGKSDNVPAKMFGKKMGSFWRYLLDNGMISKRKYNNLITDPDNISKYAQKGFINRQLVETSQVIKLTANILNGIYDKDTEIIEVPAKMNSQMRKMFDLVKVREVNDYHHAFDAYLTIFIGNYLYKCYPKLQPYFVYDNFKKFGNKEDIGHKRFNFLGKIEREKKVVAPETGEILWSNVAPNETIKQIKKVYDYKFMIVSREITTRRAELFNQTVYPKNYHGKLIPIKEDRPTDLYGGYSGNTDAYLAIVALEDKKKGKYFKVVGIPTRVAAKLEKLKQQDSQQYLQALHKVIAPQFTKSTKKGIKKTEFEIVLDKVHYRQLVQDGPVKMMLGSSTYKYNAKQLVLSEKALQVIADDRKFDETQKDDNLIAVYDEILSIVNQSFDLYDINGFRKKLNDNRDQFIDLPAETKYEGRKVVAHGKREMILEILKGLHANAAFGNLKPIGFSTAFGQLQVPNGIILSKNAILIHQSPSGLFERKIKLSDL

SEQ ID NO: 374 - protein, 1366 aa, Pediococcus acidilactici
  source 1..1366: note = MA18/5M
MGDRKYNLGLDIGTSSIGFAAVDENNQPIRVKGKTAIGVRLFEEGKTAADRRGFRTTRRRLSRRRWRINLLNEIFDAHLAEVDPTFLARLKESNRSNLDPKKSFQGSLLFPERKDYQFYEEYPTIYHLRKALMEEDRKFDIREIYLAVHHIIKYRGNFLNGTPMRSFKVENIELDTLFDQLNQLYAEIVPDNELAFDLAQVADVKDVLSSTTIYKMDKKKQLVKMMLLPASNKALQSENKKIVTQFVNAILNYKFKLDVLLQVETDADWSLKLNDEGADDKLEEFTGDLDENRLEIIDLLQRLHNWFSLNEITKDGNSLSAAMVEKYENHHHHLGLLKKVIENHPDAKKAKALKETYTAYVGKTDDKTQNQDDFYKAVEKNLDDSPDAKEIKRLIQLDQFMPKQRTGQNGAIPHQLHQQELDQIIEKQSKYYPFLAEPNPNVKRRKDAPYKLDELIAFKIPYYVGPLVTPEEQAQNKENVFAWMKRKAAGPITPWNFDEKVDRMESANRFIRRMTTKDTYLFGEDVLPAESMIYQKFVVLNELNNLKINGRHLSLKDKQDVYNDLFKQQKTVSIKALQNYYVTKKKAATAPTVGGLADPKKFLSSLSTYIDFKNMFGERVNDPQFQEDLEQIVEWSTIFEDRGIFKAKLQALGWLSEKQIQQLVAKRYKGWGRLSKKLLTGLKNAEGYSILDEMWRSTENFMQIQTRPEFAALIQQANEKQFEGNDPNNVWENIESILGDAYTSPQNKKAIRQVVKVVQDIEKAVGNPPEKIAIEFTREAAANPQRTQSRLRTLEKLYESAEEVVDAGLTAELAEFKENKHVLSDKYYLYFTQLGRDVYTGDTISLDKLNDYDVDHILPQSFIKDDSLDNRVLTIRAVNNGKSDNVPAKMFGKKMGSFWRYLLDNGMISKRKYNNLITDPDNISKYAQKGFINRQLVETSQVIKLTANILNGIYDKDTEIIEVPAKMNSQMRKMFDLVKVREVNDYHHAFDAYLTIFIGKYLYKCYPKLRPYFVYGKFKKFGDNEDIEVGDGRFNFLNRIERLKNVTDPETGEILWSNVAPNETIKQIKKVYNYKFMLVSRETTTRRAELFNQTVYPKNYRGKLIPIKEDRPTDLYGGYSGNTDAYLAIVALEDKKKGKYFKVVGIPTRAAAKLEKLKQQDSQQYLQALHKVIAPQFTKSTKKGIKKTEFEIVLDKVHYRQLVQDGPVKMMLGSSTYKYNAKQLVLSEKALQVIADDRKFDETQKDDNLIAVYDEILSIVNQSFDLYDINGFRKKLNDNRDQFIDLPAETKYEGRKVVAHGKREMILEILKGLHANAAFGNLKPIGFSTAFGQLQVPNGIILSKNAILIHQSPSGLFERKIKLSDL

SEQ ID NO: 375 - protein, 1364 aa, Peptoniphilus duerdenii
  source 1..1364: note = ATCC BAA-1640
MKNLKEYYIGLDIGTASVGWAVTDESYNIPKFNGKKMWGVRLFDDAKTAEERRTQRGSRRRLNRRKERINLLQDLFATEISKVDPNFFLRLDNSDLYREDKDEKLKSKYTLFNDKDFKDRDYHKKYPTIHHLIMDLIEDEGKKDIRLLYLACHYLLKNRGHFIFEGQKFDTKNSFDKSINDLKIHLRDEYNIDLEFNNEDLIEIITDTTLNKTNKKKELKNIVGDTKFLKAISAIMIGSSQKLVDLFEDGEFEETTVKSVDFSTTAFDDKYSEYEEALGDTISLLNILKSIYDSSILENLLKDADKSKDGNKYISKAFVKKFNKHGKDLKTLKRIIKKYLPSEYANIFRNKSINDNYVAYTKSNITSNKRTKASKFTKQEDFYKFIKKHLDTIKETKLNSSENEDLKLIDEMLTDIEFKTFIPKLKSSDNGVIPYQLKLMELKKILDNQSKYYDFLNESDEYGTVKDKVESIMEFRIPYYVGPLNPDSKYAWIKRENTKITPWNFKDIVDLDSSREEFIDRLIGRCTYLKEEKVLPKASLIYNEFMVLNELNNLKLNEFLITEEMKKAIFEELFKTKKKVTLKAVSNLLKKEFNLTGDILLSGTDGDFKQGLNSYIDFKNIIGDKVDRDDYRIKIEEIIKLIVLYEDDKTYLKKKIKSAYKNDFTDDEIKKIAALNYKDWGRLSKRFLTGIEGVDKTTGEKGSIIYFMREYNLNLMELMSGHYTFTEEVEKLNPVENRELCYEMVDELYLSPSVKRMLWQSLRVVDEIKRIIGKDPKKIFIEMARAKEAKNSRKESRKNKLLEFYKFGKKAFINEIGEERYNYLLNEINSEEESKFRWDNLYLYYTQLGRCMYSLEPIDLADLKSNNIYDQDHIYPKSKIYDDSLENRVLVKKNLNHEKGNQYPIPEKVLNKNAYGFWKILFDKGLIGQKKYTRLTRRTPFEERELAEFIERQIVETRQATKETANLLKNICQDSEIVYSKAENASRFRQEFDIIKCRTVNDLHHMHDAYLNIVVGNVYNTKFTKNPLNFIKDKDNVRSYNLENMFKYDVVRGSYTAWIADDSEGNVKAATIKKVKRELEGKNYRFTRMSYIGTGGLYDQNLMRKGKGQIPQKENTNKSNIEKYGGYNKASSAYFALIESDGKAGRERTLETIPIMVYNQEKYGNTEAVDKYLKDNLELQDPKILKDKIKINSLIKLDGFLYNIKGKTGDSLSIAGSVQLIVNKEEQKLIKKMDKFLVKKKDNKDIKVTSFDNIKEEELIKLYKTLSDKLNNGIYSNKRNNQAKNISEALDKFKEISIEEKIDVLNQIILLFQSYNNGCNLKSIGLSAKTGVVFIPKKLNYKECKLINQSITGLFENEVDLLNL

SEQ ID NO: 376 - protein, 1087 aa, Phascolarctobacterium succinatutens
  source 1..1087: note = YIT 12067
MLRMKYAIGLDIGIASVGYAVLALDHEENPWGIIRLGSRIFDVAENPKDGASLALPRREARSVRRRLRRHHHRLERIKNLLINTEFITKDELLHLYDGNLSDVYELRVKALDYSVTNAELTRILLHLAQRRGFKSNRKSDANDKEAGQLLEAVSANAKRMQENHYRTVGEMFYKDDLFSKYKRNKGGTYLTTVHRDMIAAEARTILEKQFALGNNICTQDFIDKYLSILLSQRQFDEGPGEPSPYAGNQIANMIGKCTFEPNEYRAAKASYSFERFNLLQKVNHLRLLLEGKSIALDNEQRKKIIALAHDKADLRYSHIRKALGLDEKVLFNTITYNDDVSVIEKKTKFNFLQAYHQIKKVLAEDMQKLTTEQLDNIGQILSTYKSDNKRTEELSALGLEKKIIDALLGINGLSKFAHLSLKALRKINPYLEEGKIYNEACTAAGYDFKAHANTQKTELLPAYKEEMDDITSPVARRAIAQSIKVINAIIREQKGSPLYINIELAREMAKGFDERTQIDKANKENQAKNERIMERIRTEFHKANPTGMDLIKLKLWEEQDGRSPYSQKAISINRLFEPGYVDIDHIVPYSISFDDSFKNKVLVFSDENRDKGNRLPIAYLQSKFGAKAAENFMIWVQSNIKDYKKRQKLLKREITEEDINKFKERNLQDTKTISRFLYNYINDYLLFAPSDTGKKKRVTAVNGTITAYLRKRWGINKIRANGDKHHAVDAVVIACTTDKMIKDLSSFSRYHELEYTHTDTESFLVNSLTGEILKRFPYPWEDFRPELMARLSDNPADALRKLNLIFYHGIDLSTIKPIFVSRMPRHKVTGAAHKATIKSARCLDNGIVICKTSLQNLKLDKEGEIANYYAPESDTILYNALKERLRSYDNKPAKAFAEPFYKPKADGTPGPLVKKVKVYEKSTLNVAVQQNTAVADNDSMVRVDVFHVKGNGYYLVPIYIADTLKKELPNKAIVAYKPYADWPVMDDSNFIFSLYPNDLIKFEHKNSVKFAKVNKESTLNDFYSTKSEIVYFKGCNINTGAITIINHENTYVVSSLGVKTLPSLEKYQADVLGNYTKVKKEVRKPFR

SEQ ID NO: 377 - protein, 1333 aa, Planococcus antarcticus
  source 1..1333: note = DSM 14505
MKNYTIGLDIGVASVGWVCIDENYKILNYNNRHAFGVHEFESAESAAGRRLKRGMRRRYNRRKKRLQLLQSLFDSYITDSGFFSKTDSQHFWKNNNEFENRSLTEVLSSLRISSRKYPTIYHLRSDLIESNKKMDLRLVYLALHNLVKYRGHFLQEGNWSEAASAEGMDDQLLELVTRYAELENLSPLDLSESQWKAAETLLLNRNLTKTDQSKELTAMFGKEYEPFCKLVAGLGVSLHQLFPSSEQALAYKETKTKVQLSNENVEEVMELLLEEESALLEAVQPFYQQVVLYELLKGETYVAKAKVSAFKQYQKDMASLKNLLDKTFGEKVYRSYFISDKNSQREYQKSHKVEVLCKLDQFNKEAKFAETFYKDLKKLLEDKSKTSIGTTEKDEMLRIIKAIDSNQFLQKQKGIQNAAIPHQNSLYEAEKILRNQQAHYPFITTEWIEKVKQILAFRIPYYIGPLVKDTTQSPFSWVERKGDAPITPWNFDEQIDKAASAEAFISRMRKTCTYLKGQEVLPKSSLTYERFEVLNELNGIQLRTTGAESDFRHRLSYEMKCWIIDNVFKQYKTVSTKRLLQELKKSPYADELYDEHTGEIKEVFGTQKENAFATSLSGYISMKSILGAVVDDNPAMTEELIYWIAVFEDREILHLKIQEKYPSITDVQRQKLALVKLPGWGRFSRLLIDGLPLDEQGQSVLDHMEQYSSVFMEVLKNKGFGLEKKIQKMNQHQVDGTKKIRYEDIEELAGSPALKRGIWRSVKIVEELVSIFGEPANIVLEVAREDGEKKRTKSRKDQWEELTKTTLKNDPDLKSFIGEIKSQGDQRFNEQRFWLYVTQQGKCLYTGKALDIQNLSMYEVDHILPQNFVKDDSLDNLALVMPEANQRKNQVGQNKMPLEIIEANQQYAMRTLWERLHELKLISSGKLGRLKKPSFDEVDKDKFIARQLVETRQIIKHVRDLLDERFSKSDIHLVKAGIVSKFRRFSEIPKIRDYNNKHHAMDALFAAALIQSILGKYGKNFLAFDLSKKDRQKQWRSVKGSNKEFFLFKNFGNLRLQSPVTGEEVSGVEYMKHVYFELPWQTTKMTQTGDGMFYKESIFSPKVKQAKYVSPKTEKFVHDEVKNHSICLVEFTFMKKEKEVQETKFIDLKVIEHHQFLKEPESQLAKFLAEKETNSPIIHARIIRTIPKYQKIWIEHFPYYFISTRELHNARQFEISYELMEKVKQLSERSSVEELKIVFGLLIDQMNDNYPIYTKSSIQDRVQKFVDTQLYDFKSFEIGFEELKKAVAANAQRSDTFGSRISKKPKPEEVAIGYESITGLKYRKPRSVVGTKR

SEQ ID NO: 378 - protein, 1197 aa, Porphyromonas sp.
  source 1..1197: note = oral taxon 279 str. F0450
MLMSKHVLGLDLGVGSIGWCLIALDAQGDPAEILGMGSRVVPLNNATKAIEAFNAGAAFTASQERTARRTMRRGFARYQLRRYRLRRELEKVGMLPDAALIQLPLLELWELRERAATAGRRLTLPELGRVLCHINQKRGYRHVKSDAAAIVGDEGEKKKDSNSAYLAGIRANDEKLQAEHKTVGQYFAEQLRQNQSESPTGGISYRIKDQIFSRQCYIDEYDQIMAVQRVHYPDILTDEFIRMLRDEVIFMQRPLKSCKHLVSLCEFEKQERVMRVQQDDGKGGWQLVERRVKFGPKVAPKSSPLFQLCCIYEAVNNIRLTRPNGSPCDITPEERAKIVAHLQSSASLSFAALKKLLKEKALIADQLTSKSGLKGNSTRVALASALQPYPQYHHLLDMELETRMMTVQLTDEETGEVTEREVAVVTDSYVRKPLYRLWHILYSIEEREAMRRALITQLGMKEEDLDGGLLDQLYRLDFVKPGYGNKSAKFICKLLPQLQQGLGYSEACAAVGYRHSNSPTSEEITERTLLEKIPLLQRNELRQPLVEKILNQMINLVNALKAEYGIDEVRVELARELKMSREERERMARNNKDREERNKGVAAKIRECGLYPTKPRIQKYMLWKEAGRQCLYCGRSIEEEQCLREGGMEVEHIIPKSVLYDDSYGNKTCACRRCNKEKGNRTALEYIRAKGREAEYMKRINDLLKEKKISYSKHQRLRWLKEDIPSDFLERQLRLTQYISRQAMAILQQGIRRVSASEGGVTARLRSLWGYGKILHTLNLDRYDSMGETERVSREGEATEELHITNWSKRMDHRHHAIDALVVACTRQSYIQRLNRLSSEFGREDKKKEDQEAQEQQATETGRLSNLERWLTQRPHFSVRTVSDKVAEILISYRPGQRVVTRGRNIYRKKMADGREVSCVQRGVLVPRGELMEASFYGKILSQGRVRIVKRYPLHDLKGEVVDPHLRELITTYNQELKSREKGAPIPPLCLDKDKKQEVRSVRCYAKTLSLDKAIPMCFDEKGEPTAFVKSASNHHLALYRTPKGKLVESIVTFWDAVDRARYGIPLVITHPREVMEQVLQRGDIPEQVLSLLPPSDWVFVDSLQQDEMVVIGLSDEELQRALEAQNYRKISEHLYRVQKMSSSYYVFRYHLETSVADDKNTSGRIPKFHRVQSLKAYEERNIRKVRVDLLGRISLL

SEQ ID NO: 379 - protein, 1485 aa, Prevotella bivia
  source 1..1485: note = JCVIHMP010
MKNILGLDLGTNSIGWAKISIDDNGKYIKDSIKLGSRIIPMSQDVLSNFSKGVTLSQTSERTSFRGARRLRERTLLRRERLHRILHLLGFLPKHYEKAIGWDRNDNKTYGKFINHAEPKLAWCKDNNGKMRFLFMDSFHDMLSEFSEKHPELLANGKKIPLDWTIYYLRKKALYKAITKEELAWILLNFNQKRGYYQLRGEEDRDSEANKKEYLELKVIGVEATGEKKGNDIWYNIHLENGWIYRRSSKNPLNDWLGKVKSFIVTTDLDADGNPKKDKDGNIKRSFRAPSEGDWTLIKKRTESLLENSGQTVGQFIYNHILEEPSAKIRGNFIRTIERKYYKDELKAILEKQKEFHHELSSESLLTECAKELYKRNIAHQEVLLKKGIIHLLLNDILFYQRPLKIKKSLIDNCPYENYKYVDKKSGDIKVKSIKCIAKSNPFFQEFRLWQFVSNLRLYRKSDDKDVTSEHLVTTDDYANLFTYLNNRKDIKQSVLLKEYFKIKKVKTINGAEYPVRWNYIDDDNKTYPCNETRYDILHALSKTELKSEWLTPERTYRLWHLLYSIESKEETKKALNKLNLSDDFTEAFLTIKPFKKEYGSYSEKAIKKLLSLMRMGYLWSEDEAIKQVGAEIEKTIEGELPDYVLQRLEKSQHNYNKISDFSGLPLWLASYIIYGRHSEAKEIIHWDNPESMMAYIKDFRQHSMRNPIVEQCVLETLRTVHDIWKEIGHIDEIHIELGREMKSTSEQRKAITQNVLHNQNTNIRIKLLLQELKNDNNITGVRPYSPMQQEILRIYEEGALQGLTKEDKDYNDILKISQTAQPTSNELTRYKLWLEQKYRSPYTGKAISLSKLFTSAYQIEHVIPQSRYFDDSLSNKVICESEVNTLKKAMLGMEFIKTCGGQKVHCTLLGDVEIYNEEDYKAFVNEHYSNNRTKRNKLLMEDIPQEFINRQLNDSRYISKMVKQLLSAIVRGQEEVEATSKFVIPCTGGITDRLKKDWGLNDIWNNLVSPRFQRMNALTGSEYFGHWENKEGKRVFQTTMPIQLQQGFSKKRIDHRHHAMDALVIACASRNIISYLNNETAQDTERRRDLRQKLCDKGGSVRKPWDSFTQDTQYALKDIIVTFKNYVRIINKATNYYEHYKTDGKKGMISQKGDELWAIRKPMHKETVFGKVNLRRPKRVSLSKAIDSVDIICNRKLKKYIKARLNEGLQKKQILNIFKELNNVWEGIDVNKIDIWEMSNDKEPMVATRKQLDTSFDEKKIRSISDTGIQKILLNYLITKNNNPELAFTPEGIQEMNSNISEYNDHKKHQPIYKVRVTEPLGAKYPIGTMGNNPKKFVEAQAGTNLYFAIYEDKEGKRNYDTIPLNIAAERLNQQLSPVPETNENNTPLKFYLSPNDLVYVPSEEERHSGNNIQLDKNRIYKMVSSTSKRCFFIHHRVAISLVDKKEFSAQNKMERSIDNEQVMIKSVCWKLITDRLGNIIKVIK

SEQ ID NO: 380 - protein, 1457 aa, Prevotella buccae
  source 1..1457: note = ATCC 33574
MKTILGLDLGTNSIGWAKVSVDDYGNYLHDIKLGSRIIPMSQDVLGNFDSGVTVSQTAQRTEFRSKRRLVQRNLQRRERLHRVLHVLDFLPAHYDAAIGWDRTEAVTYGKFLNHAEPKLAWEELGNGKRRFLFMDSFHEMVADFARCQPALVADGKKIPLDWTIYYLRKKALTQAITKEELAWILLNFNQKRGYYQLRGEEEEENPTKQEEYYELKVVSVEATDSRKGNDTWYNVHLENGWIYRRSSKISLDDWVGKVKQFIVTTEYEKDGATLKTDKEGYVKRSFRAPNENDWGLRKKRTETLLEMSGKTVGAFIYDHLLQEPADKIRGNFIRTIERHYYKAELEAILAEQCKYHIELRDKEMLEACARELYLNNLPHQRSLMKKDMTYLLLYDLIFYQRPLKSKKALIANCPYEYYEYVDKETGEIKRQNIKCIAKSNPYFQEFRLWQFVLNLRLFDRVEDKEVTANYLPTADDHARLFTYLNDRKEINQETLLKDYFKLKKVKIGNEKEYPIRWNYIEDKEKKYPCNETRYELLMALDRAGIEHKWLDDNNLEYRLWHLLYSVEVKSESETALRKLKNDDAFVNSFLKVKPFKKEYGAYSEKAIKRLLAVMRKGFLWNEQDICDETRKRIEIIIKGDVDEKVKERMGHAAYSFDRVSDFQGLPEWLACYVVYGRHSEAMDIQHWDSPERLMAYINNFKQYSLRNPIVEQCILETLRTVHDIWKETGQIDEIHVELGREMKSTSEERARRTQNVLRNENTNLRIKSLLIELKNDTDICNVHPYSPMQQEILRIYEEGALQELNREDEDFEEISKISQMSQPSGKELNRYKLWLEQKYRSPYTGKAISLAKLFTPAYQIEHVIPQSRYFDDSFTNKVICEAEVNTLKSNLLGYEFIKKHGGEIIHCTTLGDVRIFSESEYKAFVMDHYANNKSKKDKLLMEDIPQEFLSRQMNDSRYISKVVKTLLSNIVRMADESEATSKSVIVCTGGVTDRLKKDWGLNDVWNSIVYSRFERLNRLTGTEAFGHWENKDGKRVFQTSMPLELQRGFRKKRIDHRHHAMDALVIACASRNIVNYLNNESANNPKKREDLRRQLCDKNRVIRKPWETFTQDAYNALENVVVSFKNYVRVINKATNRYEHYDENGKKRFVQQKGSELWAIRKPMHKETYYGHVNLRRKELVTLQKALDDIPSICDKKLRDYISALVEKHFNKRQLLAHFKSTDYYWQKQYVNKVYVWTFSDDIKPLVATRKLLDTSFDAKRIGTITDTGIQKILRNYLEAKGGNATLAFTPEGIAEMNQNISKYNDGKPHQPILKVRITEPMGAKYRVGQTGNKMAKYVEAQSGTNLYFAIYEDSEGKRSYTTVPLDEVAERLKQRLSPVPEKDENDVPLKFYLSPNDLVYVPTEEELQLRECKLNKDRIYKMVSSTGNECHFIPYYVANVIYNKGGFNMQMHRPQS

SEQ ID NO: 381 - protein, 1218 aa, Prevotella buccalis
  source 1..1218: note = ATCC 35310
MNKRILGLDTGTNSLGWAVVDWDEHAQSYELIKYGDVIFQEGVKIEKGIESSKAAERSGYKAIRKQYFRRRLRKIQVLKVLVKYHLCPYLSDDDLRQWHLQKQYPKSDELMLWQRTSDEEGKNPYYDRHRCLHEKLDLTVEADRYTLGRALYHLTQRRGFLSNRLDTSADNKEDGVVKSGISQLSTEMEEAGCEYLGDYFYKLYHEQGNKVRIRQRYTDRKKHYQHEFDAICEKQELSSELIEDLQRAIFFQLPLKSQRHGVGRCTFERGKPRCADSHPDYEEFRMLCFVNNIQVKGPHDLELRPLTYEEREKIEHLFFRKSKPNFDFEDIAKELAGKKNYAWIHDKEERAYKFNYRMTQGVPGCPTTAQLKSIFGDDWKTGIAETYTLIQKKNGSKSLQEMVDDVWNVLYSFSSVEKLKEFAHHKLQLDEENAEKFAKIKLSHSFAALSLKAIRKFLPFLRKGMYYTHASFFANIPTIVGKEIWNNEQSRKYIMENVGELVFNYQPKHRDVQGTIEMLIKDFLANNFELPAGATDKLYHPSMIETYPHALRNEFGILQLGSPRTNAIRNPMAMRSLHVLRRVVNQLLKESIIDENTEVHVEYARELNDANKRRAIADRQKEQDKQHKKYGDEIRKLYKEETGKDIEPTQTDVLKFQLWEEQNHYCLYTGEQIGITDFIGSNPKFDIEHTIPQSVGGDSTQMNLTLCDNRFNREVKKAKLPTELANHEEILTRIEPWKNKYEQLVKERDKQRTFAGMDKAVKDIRIQKRHKLQMEIDYWRGKYERFTMTEVPEGFSRRQGTGIGLISRYAGLYLKSLFHQADSRNKSNVYVVKGVATAEFRKMWGLQSEYEKKCRDNHSHHCMDAITIACIGKREYDLMAEYYHMEETFRQGRGSKPKFSKPWATFTEDVLNIYKNLLVVHDTPNNMPKHTKKYVQTSKGKVLAQGDTARGSLHLDTYYGAIERDGEIRYVVRRPLSSFTNPKELENIVDETVKRTIKEAIADKNFKQAIAEPIYMNEDKGILIKKVRCFANSVKQPINIRQHRDLSKKEYKQQYHVMNENNYLLAIYEGLVKNKVVREFEIVSYIEAAKYYKRSQDRNIFSSIVPTHSTKYGLPLKTKLLMGQQVLMFEENPDEIQVDNTKDLVKRLYKVVGIEKDGRIKFKHHQEARKEGLTIYSTPYKNNDDYVPIFRQSIKNINILVDGIDFNIDILGKVTLKE

SEQ ID NO: 382 - protein, 1422 aa, Prevotella denticola
  source 1..1422: note = CRIS 18C-A
MTQKVLGLDLGTNSIGSSVRNLDLSDDLKGQLEFFSSDIFRSSVNKESNGREYSLAAQRSAHSRSRGLNEARRRKLWATLDLLIKYGFCPMSPESLMRWRTYDKQRGLFREYPIDDKNFNAWILLDFDGDGKPDYSSPYQLRRELVIRQFDFDQPIERYKLGRALYHIAQHRGFKSSKGETLSQQETNSKQSLTDDTADVAGEMKASEEKLSKGLSTYMKENNLLTVGAAFAQLEDEGVRVRNNNDYRAIRSQFQREIETIFKFQQGLSVENELYERLVSEKKNIGTIFYKRPLRSQRGNVGKCTLERTKPRCAIGHPLFEKFRAWTLINNIKVRMSEEEQAEQLPMKLRFELYNDCFLAFVRAEFKFEDIRKYLEKRLGVHFSYNDKTINYKDSTSVAGCPITARFRKLLGEDWESFHVDGQKQRQAHGKNNASFHTVSYSTNDIWHFCYDAEEPEAVLSFAQDNLKWEKKKAEELVRIWSAIPQGYAMLSQKAIRNINKMLILGLKYSDAVLLAKVPEIVEITDGEILSVTEDYHRVEAQVGYEKQINNIVNALIAKYKSASEEYRFADHNYEYQLDKSDEKDIIKQIESNIGTRKWSLLDADEQTDILQKVRDKYQNFFRSHERKFVESPKLGECFEEYLMKKFPMVEGERWKKLYHPSQIAIYRPVPANKDRSALRLGNPDIGAIKNPTVLRVLNTLRKRVNQLLDDGIISPDETRVVVETARELNDANRKWALDTYNRIRHDENEKIKKILAEFYPKRDNISTVDIDKARYVIDQREMDYFTEAKTYHKDIKKYKLWLEQGGQCMYTGRTINLSNLFDPNSFDVEHTIPESISFDSSDMNLTLCDAHYNRFIKKNHIPADLPNYDKSVVIDGKEYSPIKPRLQRWADRVERLNRNVEYWRGQARRAQNKDRKDQCMREMHLWKMELEYWTKKLERFTITEVTDEFKNSQLVDTRVITRHAVLYLKSIFPHVDVQRGDVTAKFRKILGIQSVDEKKDRSLHSHHAIDATTLTIIPGAAKRERMLELFAKIEEVNKMLSFSGNEDRTGLKQELDGLKNQLNKEVKACRIGHNVSEIGTFINDNIIINHHVKNQALTPVRRRLRKRGHIVGGMDNPRWQTGDALRGEIHKASYYGAITQYAKDKEGKVLMKEGRPQINPTIKFVIRRELKYKKSSTDSGFASWDDLGKAIVDKELFALMKGQFPEGTSFKDACEQGIYMIKKGKNGEVDTKLYRIRHIRCKTKQKNALKIKEQAYKSEKEYKRYFYAAVGDLYAMCCYTNGKTREFKIYSLYDISCHRKVGVEDIPEFITDKKGNRLMLDYKLHTGDMILLYKENPEELYDLDNVSLSKLLYKINGFENDGLRIRMVNHLVAKEAMGESVKDYAKLPDIIRCGVKTIKFLVMGENRDFVIKNGKISFNHR

SEQ ID NO: 383 - protein, 1375 aa, Prevotella histicola
  source 1..1375: note = F0411
MKKILGLDLGTTSIGWALVYESENTDEKSSIVRLGVRVNPLSVDEKGNFEKGKAITTNADRQQTHGARINLQRYKLRRENLKDCLQKQGWIGTEALCEEGKTSTFETYMLRAKAAEEEISLHELCRVLFMMNKKRGYKSNRKANNKEDGKLFDGMTVAKKLYEEHLTPAEYSFQLLSSGKKFKQEYYRSDLKEEFDRIWNEQQKYYPEILTDDFKQQLQGKSKGNTSKIFLGKYGIYSADLKGLDRKLQPLKWRVEALKQQVDKEVLAFVISDLNGQIASTSGLLGAISDRSKELYFNKQTVGQYLWTSLKETPHVSIKNKPFYRQDYLDEFEKIWETQATYHKELTPELKQEIRDIIIFYQRPLKSKKGLISVCELEQRKVKVTIDGKEKEISIGPKVAPKSSPMFQEFRIWQNLNNILLIDKGNNSIHPLYEEEKNLLYEELSVKEKLSKAEALKVLNKNSKQWDLNYKEIEGNRTQAVLYDCYNRIIVMTGHEEYNFKKLKASEIRSYVKTTFTGLGFNTDILEFDSSLTGHELEKQPMYQLWHLLYSYESDNSRTGNDALLRKLETAFGFPKEYAAVLSDVVFEDSYGNLSVKAMRKILPHLQAGLNYSQACEEAGYKHSRRSLTKNELDQKEYKEKLELLPKNSLHNPVVEKILNQMINVINAVIDEYGKPDEIRIELARELKIGAAERENMTRSINQGNAENKRIREILEKEFALSYISRNDIIKYKLYEELKSNGFKTLYSDTYISKDKLFSKDFDIEHIIPKARLFDDSLSNKTIEARDVNIAKSNKTAFDFISEKYDQQGIEAYKKKLDILLQDGSISKAKYNRLLMKEADIPSGFIDRDLRDTQYIAKKAYEILSDLVRNVTPTTGAVTSRLREDWQLVDVMKELNFEKYQKLGLVEVIEDRDGRKIKRIKDWTKRNDHRHHAMDALTIAFTKPSYIQYLNNLNARSDKNSSIYGIENKELHREDNKLRFNAPLPINEFRAEARRHLKSILVSVKAKNKVMTQNVNVIKTKHGVIKKVQLTPRGELHNATFYGTKKRPIIKMVKVGAALDEVTIKKVSSSFIREALLDRLHEYNGDAKKAFTGRNSIDKNPIYIDEEHKKTVPALVKTIEWEMYHPTRKLISPDLKIDKVIDKGIREILKTRLAKFNGDAQKAFSNLDENPIYKDEAKKITLKRVSLEGVSSVIPLHTLKDREGKLVVGKDGKPVLGDYVQTSNNHHIAFYMDENGNLQDNVVSFFEAAERKSQGVPVIDKNYNHDKGWNFLFTMKQNEYFVFPNEVTGFNPSEVDLMDEANYSIISPNLYRVQKMSKASGRDYWFRHHLEAMLNDDPKLRNSMFKRITSLKALEGIVKVRINCIGKIVAVGEYD

SEQ ID NO: 384 - protein, 1380 aa, Prevotella intermedia
MKRILGLDLGTTSIGWALVNEAENNNEASSIVRLGVRVNPLTVDEKSNFEKGKAITTNADRQLRHGARINLQRYKLRRQNLHDCLQKQGWLGTEAMYEEGKASTFETYKLRAKAAEEEISLHEFARVLFMLNKKRGYKSNRKANNKEDGQLFDGMTIAKKLYEEHLTPAEYSLQLLNKGKKFTQGYYRSDLNAELERIWDEQKKYYPEILTDEFKQQLEGKTKTNTSKIFLAKYGIYSADLKGLDRKFQPLKWRVEALQQQVDKEVLAFVISDLKGQIANTSGLLGAISDRSKELYFNKQTVGQYLWASLEENPHISIKNKPFYRQDYLDEFEKIWETQAAFHKQLTPELKQEIRDIIIFYQRPLKSKKSLISVCELEQRKVKATIDGKEKEITIGPKVAPKSSPVFQEFRIWQNLNNVLLIDNDTNEKRPLDEVERNLLYKELSIKAKLSKTEALKILNKKGKQWDLNYRELEGNRTQAILFDCYNRIITLTGHEECDFKKIKASEIRHYVSTIFKNLGFSTEILDFDPSLKKHELEKQPMYQLWHLLYSYESDNSRTGNESLLRKLETTFGFPEEYATVLCDVVFEEDYGNLSVKAMREILPYLQAGNDYSQACAYAGYNHSRHSLTKEELDQKVYKERLELLPKNSLRNPVVEKILNQMINVINAIIDEYGKPDEIRIEMARELKSSAADRKKTTHAISQGNAENQRIREILEKEFSLSYISRNDIIKYKLYEELEPNYYKTLYSDTYITKDKLFSKDFDIEHIIPKARLFDDSFSNKTLEARNINLEKSNKTAFDFIKEKYGEDGAEAYKKKLDMLLENDAISRPKYNNLLRAEADIPSDFINRDLRNTQYIAKKACEILGELVKTVTPTTGKITNRLREDWQLVDVMKELNFEKYEKLGLTEIVEDRDGRKIKRIKDWTKRNDHRHHAMDALAIAFTKPSFIQYLNNLNARSNKGDSIYAIENKELHYEEGKLRFNAPIPVNEFRAEAKRHLSAILVSIKAKNKVMTQNVNKIKTKHGIIKKIQLTPRGPLHNETIYGTKMRPIIKMVKVGAALDEATINKVSSPAIREALLKRLNEYSGNAKKAFTGKNTLEKNPIYLNAGRTKTVPSLVKTVEWESFHPTRKLIDKDLNVDKVVDKGIREILKARLEEFNGDAKKAFSNLEENPIYLDEAKKIALKRVSIEGVLSAIPLHTLKNQAGKPITGKDGKPVLGNYVQTSNNHHIAFYYDEDGNLQDNAVSFFEAAERKSQGIPVIDKDYNRDKGWRFLFTMKQNEYFVFPNEATGFIPSEVDLTDEANYGIISPNLYRVQKVSRIDKGTSASRDYWFRHHLETILNDDAKLKNLAFKRIRGLLELKDIIKVRINSTGKIVAVGEYD

SEQ ID NO: 385 - protein, 1425 aa, Prevotella micans
  source 1..1425: note = F0438
MIQKIFGLDLGTNSIGSSVRNLELGENLTEQLEFFSSDIFGSSVSKNSNGREYSLAGNRSAHRRSRGLNEARRRKLWATLDLLIEHGLCPMSPDSLMQWRTYDKQKGLYRQYPIEDKDFNAWIMLDFNGDGKPDYSSPYQLRRELVVRQFDFDQPIERYKLGRALYHIAQHRGFKSSKGETIADQEKNEKKPIAEEGADIANEMKASETKLSKGLVAYMQENHLKTVGEAFAKLEDERVRIRNNESYRAIRSQYQDEIKEIFTYQKKLSVESELYERLTSEKKGVGTIFYKRPLRSQRGNVGKCTLERNKPRCPIGRPEFEEFRAWTLINNIKIRETAGEPYKQLPIKLRQELLKDCFLSKVKADFKFEDIRKYIEKRLGLSFSNDDKTINYKDSVSIAACPVTVRMKKLLGENWANCRIDGEKRRQAHGKNNNNEHIVSYTEEDIWHVCYNAEDPEEVSNFARKALHWDENKIKELVRLWTSIPQGYAMLSLKAIRNINRMLLLGLKYSDAVLLAKLPDIVPVSDEDILAITKEFLQLEDKLNQEKQINNIVNSLIANYKSKLEENRFADHNYQYQLGEGDDEDINTQIKSHIGAKLWVQIGADEQTKIFQAVRSKYQDFFKSYKRKFVESPKLGELLVAFLTEKFPNVKSKQWERLYHPSQIAIYRPIPVDNDRSKLRLGNPNIGAIKNPTVMRVLNTLRRRVNQLLDDGVISPDETRVVVETARELNDANTKWALDRYNRIRRDENEKIRKILKELNPTTNSISEQDIDKARYIFEQCETDFYTDGKVPYYNKDIKKYKLWLEQGGQCLYTGQTINLTNLFNPNAFDMEHTIPKSISFDNSDQNLTLCESYYNRFIKKNNIPTDMPNYDKDVTINGKEYTAIKPRLQRWKERVDRLSRNVDFWKGQARRAQDKDRKDECIREKHLWDMELAYWKGKLERFTMTDVTDGFKNSQLVDTRVITRHAVLYLKSIFNHVEVQRGETTAEFRKILGLQSIDEKKDRSLHSHHAIDATMLTVIPSAAKRDRMLELFYKIEETKKALKNYNDNNKTGLNLELKGLEEKLDKEKKDCRVGRRVNDLDRFINENIIVSHHTKDQALTPAHRRLRKRGKIVGGKEHPRWQTGDSLRGEIHKASYYGAITQFAKDANGKVLMKDGQAQIDPTIYYVIRRELKYKRSTQDSGFTNWEDLEKVIVDTDLFGLMKGQFPEGTSFKDACEQGFYMIKKGKNGEGDVKTHRIRHVRCKAVKTALRIKEQTYKSSKDYKQFFYAAVGDLYVMCYYTDGKKRDFKIYSLYDISNHRKSGTEDIPKFITDKKGNHLPLDYKLRTGDMVLLYKDNPEELKDLDQVNLKRRLYKVNRFESEGLIILLTHHLSTTTERGCSIGKIENYQNLPTAIRCGIKTIKFLIMGKHRDFVIRNGNIEFKH

SEQ ID NO: 386 - protein, 1506 aa, Prevotella nigrescens
  source 1..1506: note = ATCC 33563
MKTILGLDLGPNSIGWAKVEVDDEGNYLRNIKLGSRIIPMTQDMLGDFDKGVKVSQTAIRTDFRGNRRLIERHLLRRERLHRVLHALKFLPKHYEDAIGWDRNEPATYGKFVNNSEPKLAWERQEDGSMRFLFMESFNEMVADFAQNQPSLVSDGKKIPLDWTIYYLRKKALTRPIKKEELAWILLNFNQKRGYYQLRGEEEEDNLTKRKEYYKLKVVGVEADGAPKGGKTWYNIHLENGWTARCQSKIPLDDWVGKVKEYIVTTEYEDDGKTPKCDKEGKVKRSFKSPEKDDWQLIKTRTEKFIDDSNKTVGAFIYDYLLEKPFDKIRGKYIRTIERKYYKNELREILREQTKYHEGLHSLEALKICAEELYKNNQQHQEYLLKKDMTFLLLNDLIFYQRPLKSKKSLIADCPYEVYKYDDKLTGKKGQKKIKCIAKSNPYYQEFRLWQFIANLRLFSVTDGKEVTAEYLKTEEDYVRLFSFLNDRKDIKQETFLRSFLKLKKESIGSEKIYPIRWNYIEDANKSYPCNATRHELLLAFDRADIPRELLDVEEREYRLWHLLYSIEAKEETESALRKLKANKAFGDLNIDDAFVNSFLKIKPFEKEYGAYSEKAIKKLLAVMRRGSLWKEADICEATKQNIAKILQNDIDEKLKKKIEAAVSSFNKLSDFQGLPTWLACYVVYGRHSEAAQIQCWQSPEDLKTYINKFKQHSLRNPIVEQCLLETLRTVYDIWKDAGQIDEIHIELGRNMKSTAEQRARKTKDILRNENTNLRIKNLLVELKNDDKIENVRPYSPSQQEILRIYEEGALQELSKEDEMFEDISKISKMAQPSPTELSRYKLWLEQKYRSPYTGRVIPLSKLFTTAYQIEHIIPQSRYFDDSFNNKVICESEVNSLKDNMLGYEFIKECGGRIVHCTLLGDVKIFTKEEYKDFVTKHYIDNTYKRDKLLLEDIPQEFSARQLNDSRYISKMVQTVLSNIVRAENEQEATSKFVVSCNGAITNRLKKDWGLNDVWSSIVCPRFKRLNEITKTNAFGHWEDKAGKHVFQTTVPLELQRGFSKKRIDHRHHAMDALVIACASRNIVNYLNNESANSPEKREDLRKKLCDEKRKIRKPWKTFTQDAREALSDVVVSFKNYVRVINKATNYYEHYSSSGNKVMISQKGNDMWAIRKPLHKESVFGRVNLCRKVIVSLKKALENIPAICDKTLRDYINALVEKHFNTRQLLAHFKSINYRLNRQCVEKVEVWQFSDEKIEMVARRKSLDTSFDDKQISSITDTGIQKILLNYLQTKDGNAEIAFTPEGIEEMNKNISLYNDGKAHQPILKVRVATPKGMKYPVGQTGNKATKFVVAEKGTNLYFAIYENELGVRSYDTIPLNIVVERLKEGLSPVPQANEADIPLKFYLSPNDLVYVPTKENEDELCRDRIYKFVDSSGTTANFVPHTSANTIYNVDKEYAEKCCNGAVFLNEYGLGSPQSKNQRALTGEMIKEICWKLKVDRLGNIIKVIK

SEQ ID NO: 387 - protein, 1380 aa, Prevotella nigrescens
  source 1..1380: note = F0103
MKRILGLDLGTTSIGWALVNEAESNNEASSIVRLGVRVNPLTVDEKSNFEKGKAITTNADRQLRHGARINLQRYKLRRQNLHDCLQKQGWLGTEAMYEEGKASTFETYKLRAKAAEEEISLHEFARVLFMLNKKRGYKSNRKANNKEDGQLFDGMTIAKKLYEEHLTPAEYSLQLLNKGKKFTQGYYRSDLNAELERIWDEQKKYYPEILTDEFKQQLEGKTKTNTSKIFLAKYGIYSADLKGLDRKLQPLKWRVEALKQQVDKEVLAFVISDLKGQIANTSGLLGAISDRSKELYFNKQTVGQYLWASLEENPHISIKNKPFYRQDYLDEFEKIWETQATFHKQLTPELKQEIRDIIIFYQRPLKSKKSLISVCELEQRKVKATIDGKEKEITIGPKVAPKSSPVFQEFRIWQNLNNVLLIDNDTNEKRPLDEDERYLLYKELSIKAKLSKTEALKILNKKGKQWDLNYKELEGNRTQAILFDCYNRIITLTGHEECDFKKIKASEIRHYVSTIFKNLGFSTEILDFDPSLEKHELEKQPMYQLWHLLYSYESDNSRTGNESLLRKLETTFGFPEEYATVLCDVVFEEDYGNLSVKAMRKILPYLQAGNDYSQACAYAGYNHSRHSLTKEELDQKVYKERLELLPKNSLRNPVVEKILNQMINVINAIIDEYGKPDEIRIEMARELKSSAADRKKTTHAINQGNDENQCIREILEKEFALSYISRNDIIKYKLYEELKPNGFKTLYSDTYIPKDKLFSKDFDIEHIIPKARLFDDSYSNKTLEARDINLAKSNKTAFDFVKEKYGEQGAEAYKKKLDMLLGNNVISKPKYNKLLMTEADIPSDFINRDLRNTQYIARKACEILGELVRTVTPTTGKITNRLREDWQLVDVMKELNFEKYEKLGLTEIVEDRDGRKIKRIKDWTKRNDHRHHAMDALAIAFTKPSYIQYLNNLNARSNKGDSIYAIENKELHYEEGKLRFNAPIPVNVFRAEAKRHLSAILVSIKAKNKVMTQNVNKIKTKHGIIKKIQLTPRGPLHNETIYGTKMRPIIKKVKVGAALDEATINKVSSPAIREVLLKRLNEYSGNAKKAFTGKNTLDKNPIYLNAERTKTVPASVKTVEWENYHPIRKPITPDLKVDKVIDKGIGEILKARLEEFNGDAKKAFSNLEENPIYLDQTKKIALKRVSIEGVLSTIPLHTLKNQAGKPIMGKDGKPVLGNYVQTSNNHHIAFYYDEDGNLQDNAVSFFEAAERKSQGISVIDKDYNRDKGWRFLFTMKQNEYFVFPNEATGFIPSEVDLTDEANYGIISPNLYRVQKMSRIEKGTSVSRDYWFRHHLETILNDDSRLKNSAFKRINSLKPLEGIIKVRINSIGKIVAVGEYD

SEQ ID NO: 388 - protein, 1391 aa, Prevotella oralis
  source 1..1391: note = ATCC 33269
MKKILGLDLGTTSIGWALVNEKENNEELSSIIRLGVRVNPLTVDEKSNFEKGKDITTNADRTKCRSARRNLQRFKLRREALADCLKRHGLMTDETPLCETNNSIIFKTYSNRAKAVCEKIALDDFVRVLFMINKKRGYKSSRKLNTDDEGTLVDGMDVAKLLYNEQITPGEYLLRLFKKGKKTRPDFYLSDLKAELERIWDFQRTFYPEILCNALKEDLKGKSRTQSSAIFYAKYKVSTAKIAGKDKRLQELTWRTDALRKQLTIDEVAYVICSINGEVNGSSQRLSMISDRSKLLYFNHQTIGQYLMQRLEENPNAGLKNIIFYRQDYEDEFNDIWNSQATYHKELTPELKKEVKDIIFYQRGLKSCKWLINYCELEHEEIEVKTPEGKLRKITIGSKTCPKSSPLFQEFKIWQVLNNLQVSPLNSRRKAKRKKDEEPSLFSDEDMNTACRYLNEEEKLTLFKELSIKKELKKKDALKLLFENYKELDLNYKVISGNVTMANLYRAFQDIISLTGNGEFDFQAMPAEEAEKTVEEIFGGLGYKTAFLHFDASLHDKEFERQPAYRLWHLLYSYAGDQSKTGIEALVKRIQELCGFEPEYARILANISFIPDYGNLSSKAMRKILPYMQDGYEYSEACSKAGYRHSASSLTKEEINKKNYKTHLDEIKRNSLRNPIVEKILNQMVNVVNSVIDTYSNIDEIRIEMARELKKSKPEREDMSFAISKATKETERIKGILEQEFKIQHVTRNDIIRYRLYEELKPNGYKTLYSNTYIPREDLFSKKFDIEHIIPKARLFDDSYSNKTLELRDINIEKGNQTAYDFVLSKYGEEGLYKYEQRVEEFKKNNEQAGTKCRKLLMREADIPSDFLNRDLNDSQYIAKKAHELLREIVPTVTATTGSITNRLREDWKLVNVMKELNWEKYDKLGLTEEYKDKDGNTVRHIKDWTKRNDHRHHAMDALTIAFTKPSFIQYLNNLNARSNRGGSIYGIEQKELERENNKLVFIPPIDPKIFRKQAKEHLSNILISIKAKNKVVTKNVNKTKSKSGTNRKVQLTPRGQLHLETVYGKIRTYKTEEIKVGTKLTEELIAKVADKKIREALMQRLSEYGGNIKKAFQNISKHPIWLNGSHTKHVPEKVKIVFFEDVFTIRKAITPDIKIDKVIDSKIRRILQERLNEFGGEASKAFSNLDENPIWFNRDKGIAIKSVKIRGIAKGTAIRVKKDIHGKTIIGNNGYPVANDYVNTGNNHHVAIFRDKDGNLQEHIVSFYEATARAIQNLPIVDRNYNSEKDWKFLFSMKQNEYFVFPNPNTGFNPSEISLKDEKNYALISPNLFRVQKLSHYYYVFRHHLETNVDTNLQLKDITWKRITAVNNLTGAVKVRIDHLGRIVDVGEYK

SEQ ID NO: 389 - protein, 1204 aa, Prevotella ruminicola
MERILGIDTGTNSLGWAIVDKDENQYHLVAKGTNIFSEGVKIEKGIESSKAAERTEHRSVRKHYWRRKIRKIRLLTILSDNDLCPRLKHEQLRQWRLKKVYPTDDTFMEWQRTEDKAQVNPYKFRYICLTQKLDLSDITQRFILGRALYHLNQRRGFLSNRKEATKESEGTVKEGISSLSKDMKDSGCEYLGEYFYQLYQQGKKIRNHYTARKEHYLKEFKAICSKQELDDALIEKLEKAIFDQRPLKSQKGQVGTCTFEKGKSRCPSSHPLYEDFRMYSFINNIKVQVDTLYDKGERSLTDEEKQLIIPLFKRKSKRTFPFEDIAKKIAGKNNYCYIKSNEEKAYKFNYQMDTQVSGSPVNAQLEEIFGEDWLSSVCEVYTLANNKSRFQIMNDVWHVLFFYDDEDKLKEFAKDRLQLDDELAEKFSKISIPNDYAALSLKAIRKIMPYLRDYGLIYSEAVFLANLVDVLPQHVWGIKEMREAAIENVIDVMHSYDKNNIDGITLEGCVKTFLKERYQVSDDNLKKLYHPSMLDPYPRQRPNDEGVFQLGSPRISSVKNPMAMHSLFRLRKVVNLMLKKGYITPDTKVHIEFSRDLNDANKRWAIQTWQRENEKERERCRKEIEKYIASPSDTDILKYQLWEEQNHKCLYTGDEIRITDFLGDNPKYDIEHTIPRSAGGDSTKMNLTLCSSRFNRDEKKTKLPAELVNHDEILERISNWKEKYEDIDKQIRKISTKGATSKEDKDSKIRRRHYLILQRDYWRGKYQRFTMTEVPEGFSRRQGTDISVISRYARMYLKSVFKQVYIVKGIATSDFRKMWGIQDEYAKKERVNHVHHCIDAITIACIGKAEYDKLADYRHQYDDYLFQGKTKPTFDKPWPSFVIDIKHIQDELLIAHYAKDNLEKFTKKNLRGKDGRIIRDKFGNKLQMKGDTSRNSLHNDKFYGAINHEGEIKYVYRTNIEALDAKSIGNIVDPTVRSIIESAIAIHGSLKAAINKGIWMNEEKHIPIKKVRVFRNDVKKPIELKDQRDLSDKDYKQHYYVTNDGNYMMLIFSKLNNKGREIRQHVVINSLEATEVIKSHKRSQVGKVVWESYYSKEGFDLIYKLKSGTMILLYENNRDEVWDLDIRNLQKRLYIITKMKYDGRIYMMHHQEAREKKDLEEKSGSFKINEDYRPLIVNSYNQFNALVQDLDFEINDLGEIRRLI

SEQ ID NO: 390 - protein, 1424 aa, Prevotella sp.
  source 1..1424: note = C561
MTQKVLGLDLGTNSIGSAVRNLDLSDDLQWQLEFFSSDIFRSSVNKESNGREYSLAAQRSAHRRSRGLNEVRRRRLWATLNLLIKHGFCPMSSESLMRWCTYDKRKGLFREYPIDDKDFNAWILLDFNGDGRPDYSSPYQLRRELVTRQFDFEQPIERYKLGRALYHIAQHRGFKSSKGETLSQQETNSKPSSTDEIPDVAGAMKASEEKLSKGLSTYMKEHNLLTVGAAFAQLEDEGVRVRNNNDYRAIRSQFQHEIETIFKFQQGLSVESELYERLISEKKNVGTIFYKRPLRSQRGNVGKCTLERSKPRCAIGHPLFEKFRAWTLINNIKVRMSVDTLDEQLPMKLRLDLYNECFLAFVRTEFKFEDIRKYLEKRLGIHFSYNDKTINYKDSTSVAGCPITARFRKMLGEEWESFRVEGQKERQAHSKNNISFHRVSYSIEDIWHFCYDAEEPEAVLAFAQETLRLERKKAEELVRIWSAMPQGYAMLSQKAIRNINKILMLGLKYSDAVILAKVPELVDVSDEELLSIAKDYYLVEAQVNYDKRINSIVNGLIAKYKSVSEEYRFADHNYEYLLDESDEKDIIRQIENSLGARRWSLMDANEQTDILQKVRDRYQDFFRSHERKFVESPKLGESFENYLTKKFPMVEREQWKKLYHPSQITIYRPVSVGKDRSVLRLGNPDIGAIKNPTVLRVLNTLRRRVNQLLDDGVISPDETRVVVETARELNDANRKWALDTYNRIRHDENEKIKKILEEFYPKRDGISTDDIDKARYVIDQREVDYFTGSKTYNKDIKKYKFWLEQGGQCMYTGRTINLSNLFDPNAFDIEHTIPESLSFDSSDMNLTLCDAHYNRFIKKNHIPTDMPNYDKAITIDGKEYPAITSQLQRWVERVERLNRNVEYWKGQARRAQNKDRKDQCMREMHLWKMELEYWKKKLERFTVTEVTDGFKNSQLVDTRVITRHAVLYLKSIFPHVDVQRGDVTAKFRKILGIQSVDEKKDRSLHSHHAIDATTLTIIPVSAKRDRMLELFAKIEEINKMLSFSGSEDRTGLIQELEGLKNKLQMEVKVCRIGHNVSEIGTFINDNIIVNHHIKNQALTPVRRRLRKKGYIVGGVDNPRWQTGDALRGEIHKASYYGAITQFAKDDEGKVLMKEGRPQVNPTIKFVIRRELKYKKSAADSGFASWDDLGKAIVDKELFALMKGQFPAETSFKDACEQGIYMIKKGKNGMPDIKLHHIRHVRCEAPQSGLKIKEQTYKSEKEYKRYFYAAVGDLYAMCCYTNGKIREFRIYSLYDVSCHRKSDIEDIPEFITDKKGNRLMLDYKLRTGDMILLYKDNPAELYDLDNVNLSRRLYKINRFESQSNLVLMTHHLSTSKERGRSLGKTVDYQNLPESIRSSVKSLNFLIMGENRDFVIKNGKIIFNHR

SEQ ID NO: 391 - protein, 1483 aa, Prevotella sp.
  source 1..1483: note = MSX73
MKTILGLDLGTNSIGWAKVSVDDYGNYLHDIKLGSRIIPMSQDVLGNFDSGVTVSQTAQRTEFRSKRRLVQRNLQRRERLHRVLHVLDFLPAHYDAAIGWDRTEAVTYGKFLNHAEPKLAWEELGNGKRRFLFMDSFHEMVADFARCQPALVADGKKIPLDWTIYYLRKKALTQAITKEELAWILLNFNQKRGYYQLRGEEEEENPTKQEEYYELKVVSVEATDSRKGNDTWYNVHLENGWIYRRSSKISLDDWVGKVKQFIVTTEYEKDGTTLKTDKEGNVKRSFRAPNENDWGLRKKRTETLLEMSGKTVGAFIYDHLLQEPADKIRGNFIRTIERHYYKAELEAILAEQCKYHIELRDKEMLEACARELYLNNLPHQRSLMKKDMTYLLLYDLIFYQRPLKSKKALIANCPYEYYEYVDKETGEIKRQNIKCIAKSNPYFQEFRLWQFVLNLRLFDRVEDKEVTANYLPTADDHARLFTYLNDRKEINQETLLKDYFKLKKVKIGNEKEYPIRWNYIEDKEKKYPCNETRYELLMALDRAGIEHKWLDDNNLEYRLWHLLYSVEVKSESETALRKLKNDDAFVNSFLKVKPFKKEYGAYSEKAIKRLLAVMRKGFLWNEQDICDETRKRIEIIIKGDVDEKVKERMGHAAYSFDRVSDFQGLPEWLACYVVYGRHSEAMDIQRWDSPERLMAYINNFKQYSLRNPIVEQCILETLRTVHDIWKETGQIDEIHVELGREMKSTSEERARRTQNVLRNENTNLRIKSLLIELKNDTDICNVHPYSPMQQEILRIYEEGALQELNREDEDFEEISKISQMSQPSGKELNRYKLWLEQKYRSPYTGKAISLAKLFTPAYQIEHVIPQSRYFDDSFTNKVICEAEVNTLKSNLLGYEFIKKHGGEIIHCTTLGDVRIFSESEYKAFVMDHYANNKSKKDKLLMEDIPQEFLSRQMNDSRYISKVVKTLLSNIVRMADESEATSKSVIVCTGGVTDRLKKDWGLNDVWNSIVYSRFERLNRLTGTEAFGHWENKDGKRVFQTSMPLELQRGFRKKRIDHRHHAMDALVIACASRNIVNYLNNESANNPKKREDLRRQLCDKNRVIRKPWETFTQDAYNALENVVVSFKNYVRVINKATNRYEHYDENGKKRFVQQKGSELWAIRKPMHKETYYGHVNLRRKELVTLQKALDDIPSICDKKLRDYISALVEKHFNKRQLLAHFKSTDYYWQKQYVNKVYVWTFSDDIKPLVATRKLLDTSFDAKRIGTITDTGIQKILRNYLEAKGGNATLAFTPEGIVEMNQNISKYNDGKPHQPILKVRITEPMGAKYRVGQTENKMAKYVEAQSGTNLYFAIYEDSEGKRSYTTVPLDEVAERLKQRLSPVPEKDENDVPLKFYLSPNDLVYVPTEEELQLRECKLNKDRIYKMVSSTGSECHFIPYYVANVIYNKVEFEAKNKIGRALTGEMIKAVCWKLEIDRLGNILKVIK

SEQ ID NO: 392 - protein, 1375 aa, Prevotella sp.
  source 1..1375: note = oral taxon 306 str. F0472
MKKILGLDLGTTSIGWALVNESENKDEQSSIVRLGVRVIPLTVDEKGNFEKGKAITTNADRQQVHAARINLQRYKLRRENLRDCLQKQGWIGSEPMCEDGKSSTFETYKLRAKAAVEEVSLHEFARVLFMLNKKRGYKSNRKANDKEEGKLFDGMTIAKKLYEEHLTPAEYSLQLLNTGRKFTPEYYRSDLIEEFEKIWNEQQKYYPEILTDEFKQQLEGKAKSNTSKLFLGKYGIYSADTKGLDRRLQPLKWRVEAMKQQVDKDVLAFVISDLKGQIANTSGLLGAISDRSKELYFSKQTIGQYLWASLQENPHISIKNQPFYRQDYLDEFEKIWETQATYHKELTSELKQEIRDIIIFYQRPLKSKKNLIAVCELEQRKVKVTVDGKEKEITIGPKIAPKSSPMFQEFRIWQNLNNILLLDHETNSKRPLYEEERNLLYEELSVKEKLSKTEALKVLGKKSKQWDLNYKELEGNRTQAVLYDCYNRIIVMSGHEECNFKKLKASDIRHYVKMIFKNLAFNTDILCFDSSLKGHELERQPMCQLWHLLYSYEGDNSRTGNDALLRKLETSFGFPKEYAAVLADVIFEDSYGNLSVKAMRNILPHLQAGKDYSQACEEAGYKHSRRSLTKEELNQKVYKEKLELLPKNSLHNPVVEKILNQMVNVINAVIEEYGKPDEIRIELARDLKIGAAERENMTRSINQGNAENKRIREILEKEFALSYLSRNDIIKYKLYEELKSNGFKTLYSDTYISKDKLFSKDFDIEHIIPKARLFDDSLSNKTIEARDVNIAKSNKTAFDFILERYGEQGVKTYKTKLLRLLEDGAISNKKYNNLLKTEADIPSGFIDRDLRNTQYIAKKAYEILSELVKIVTPTTGSVTNRLREDWQLVDVMKELNFEKYQKLGLADVIEDRDGRKVKRIKDWTKRNDHRHHAMDALTIAFTKPSYIQYLNNLNARSDKSSSIYGIEVKELHREEGKFRFNAPLPINEFRAEAKRHLKSVLVSIKAKKKVMTQNVNKIKTKHGIIKKVQLTPRGELHNATYYGTKKRPLVRMVKVGAALDEATIKRVCSPAIRAALLKRLNAYNGDAKEAFTGRNSIDKNPIYLDIEQTKLVPVLVKTIEWGMYHPIRKRITPDLKIDKVIDKGIREKLKARLAEFNGDAQKAFSNLDENPIYMDEAKRITLKRVSIEGVLSAIPLHTLKDKAGKPVIGSDGKPVFGDYVQTSNNHHIAFYIDDKGNLQDNPVSFFEAAERKSQGVPVIDRRYNCDKGWHFVFTMKQNEYFVFPNEATGFIPSEVDLLDEANYCIISPNLYRVQKLSKASGRDYWFRHHLETMLNDDLRLKNSTFKRIQSLKGLEDIVKVRINSIGKIVAVGKYD

SEQ ID NO: 393 - protein, 1216 aa, Prevotella stercorea
  source 1..1216: note = DSM 18206
MTKILGIDTGTNSLGWAIVDKTADNYNLLDKGVNIFQEGVKIEKGIESSKAAERTEHRATRVRYYRIKLRKIRLLRILSDNHLCPPLSQEELSTWRLKKVYPKNELFMQWQRTDDDTEKTPYAYRHKCIHEKLDLSDVTDRYILGRAFYHIIQRRGFLSNRKEQGGEDSGKVKEGISTLTHEMNEAGYEYLGDYFYALYNKGEKIRKHYTARNEHFLSEFKAICEKQDLEKELGSEVVRNIEKAIFDQRPLKSQKGQVGKCVFEKNKTKCPSSHPMYEEFRMLTFINNIKIKTPNDDVLRPLNTGEREKIMPLFFRKSKKQFDFEDITKKLAPKKMYGFYKKEEDAEMPFLFNYPMDTSVSGCPVTAALKDVFGDDWITAICETYTLGEGKSRFDIVNDIWHALYFYSDKDKLAEFAINRLQLSEDEAKIFSEISLPADYASLSLKAICKILPYLRRGLIYSHAVFLGNLCEVMPKYEWSIKEMRETIIDNIIMEMDKCDTKDKRTFEVCIKDYLKGQYNVSDNSLKKLYHPSMIETYPRVQYTNEHGVYQLGSPRIDSVRNPMAMRSMFRLRKLVNRLLVEGKIDQNTEVHIEFARELNDANKRNAIALFVKENQSANDEARKQIITLFKKETGTDIEPTDKDILKYVLWEEQNHICLYTGKQIRISDFIGANPKFDIEHTIPRSVGGDSTKMNLTLCDSRFNREVKKTKLPVELPNHDEIMERIKEWKKNYELLDIQIRKNKKLSKGATTKEQKDTIIRKRHLLELRRDYWRGKYERFTMESVPEGFSRRQGTDISVISKYARLYLKSLFNRVYTVKGIATSDFRKIWGIQDIYSKKERINHVHHCIDAIVIACIGLDEYNKLGAYYHDEENNKWYGMSKASFKKPWATFVEDIKKIQDEILVYHYTPDNMPKQGRRRIKIDGKKILCKGDAARGSLHNDTYYGAIENDGAVKYVKRIDLASLEEKDVKNIVDDTVRSIIEAAIKEKGFKDAMASTIWMNEEKRVPIKKVRCFTPSITKPLNIRKQRDVSIKEYKQQYHVANDSNYLLALYIGTDNKGKEKREFEIVNILQAAQYYRTSNDKEVVDRHIVPIKSEHDYPFAYTLKIGTMVLLYEKSPNEVWDATIKERNRRLYKVTGLSTMRMKGRNGEYAYATVKLIHNEEARPSKDIKAKNGEYEQGEEFRPAIIMLHTQLNALVQGYDFEINELGEIRRLR

SEQ ID NO: 394 - protein, 1234 aa, Prevotella tannerae
  source 1..1234: note = ATCC 51259
MPNFWSIFTENLQTYLMKTRILGLDTGTNSLGWAVVDRDENNQYTPICRGDLIFTEGVKQEKGIEFSLAAERTSYRASRRHYFRRRLRKVEVLKVLVKHKLCPPLSDEALNRWHTKKEYPLDEDFILWQRTNEADNKNPYHDRHICLHRKLNLKDSQTDRYTLGRALYHLTQRRGFLSNRLDQNEEAEETGKVKSAISELSKEMKEAGCEFLGDYFYLLYRTEGNRVRIRSRYTDREKHYLQEFKEICRVQELDEDLAKALEKTIFFQRPLKSQRQGVGKCTMEKGHSRCAVSHPLYEEYRLLCYLNNIRIKTPSDDRLRPLNAEEREKITPLFYKEKNFDFEKIAKKLAGKTPFGWIRDAEDWPYQFNYRMTQEAPACPTTAQLIKVFGEDWKAALAETYTMSAKQDGTLKTEDEICTDIWNVLYSFSSKEKLKEFGLKKLQLDEVQAKAFSEIRLTRDFASLSLKAIRKILFFLRTGEDYSKAIFLANIPTIVGEEIWNDIERRSRLLYKVDLALRPQEERDAEEHRTIAERIKAAVAAEVPDAPIDLLYHPSMIEAYPDAKRNERFDCYQLGSPKTNAVRNPMAMRSLHMVRKVINHLLRKHIIDEKTEIHIEYARELNDANKRQAIADWQRELSKRHTAYAQNIRQLYKAETGLVIEPTKADILKYQLWEEQQHVCLYTGKKIGIADFLGANPKFDIEHTIPRSRGGDSTQENLTLCESKFNRDIKRDKLPTELANYEEILARIEHWKKQCYALKLKRDGIRTHSGLEKSIKDSRIRRRHLVGLEYGYLKGKYDRFTMKEVPEGFSRRQGAGIGLISKYAGLFLKSLFKDPKNPNRSNVYVVKGAITAEFRKLWGLQQADEAKSRENHTHHCIDAYTIACIGPCEYAALAAYYRSDEEFKYGRRREKPQFEKPWPTFTEDLLKLQEELLIVHQTTDKLGKRDRRKVKTPRGKFLTGGDSARGRLHQETYYGAINYDGNIKYVVRKPLDSLTEKDLDKIVDETVMGIVKGAVEAKGSLKEALADGIYMNKEKGILIKRVRIFSDVSEPINLKQLRDVSTKEYKRHIHLRKDENYLFAIYEGIDKKKNKKQTETATVDYLDAAKFYKDSKRRDKANSLVGDYSKKNKLPLKCILKKRQMVLFYEHSPEEIRFKDKKDLSRRLYIVTSIAKDGRVKFLHHQAATATGIQSSPSPFTNDGEHQPYYRLSASNIKVLVAGIDFDINILGEITPKL

SEQ ID NO: 395 - protein, 1487 aa, Prevotella timonensis
  source 1..1487: note = CRIS 5C-B1
MKNILGLDLGSNSVGWALVKVEENGNPIGSIKMGSRIIPMSQDILGSFEKGDTVSQTAQRTLYRGKRRLIERHVLRRERLCRVLHIMNFLPAHFDRLLGWDKTDNKTYGKFIDDSEPKLAWRQNKNEMGKMEFVFMDSFHEMLSDFAKHQPQLIANGKKVPLDWTIYYLRKKALTQLISKEELAWILLNFNKKRGYYQLRGEEEEEQPTKKEEYKVLKVISVDADEGQKGNGIWYNIHLEDGGIYKKKSDIPLYDWVGKTLQLIVVTTYEKDGKTPKIFDSGKQNPSYRLPKEDDWGLVKKRTESQLQSSGKTVGAFIYDNILSKPDDKIRGNLVRTIERKYYKKELIEILQQQAKYHDELHNQNLLESCAKELYAHNDVHYNEVIKSNMINLLVNDIIFYQRPLKSKKSLIANCKYESYEYVDKETGEIKEMPIKCIAKSNPYYQEFRLWQFIHNLRLSDVVTREDVTAQYLSTPQDYCNLFTYLNDRKEIKQDILLKDFFKIKKVQIDKEKVFPIEWNYIKDATKSYPCNETRYELLSALKRAGMDKQWLDDTPNMQYRLWHLLYSVEEKEESAKALRKLYDDDKFVTSFLKIKPFNKCYGAYSEKAIKRLLTLMRMGKAWNEQAIDAKTLKCIQQIITDNVDSKLKEKIDDSRYVLHHVSDFQGLPTYLASYVIYGRHSEVTDIQCWDSPEDLLKFIRDFKQHSLRNPIVEQVILETLRVVYDIWKAEKHIDEIHVEVAREMKLTAQQRNEANLRNLNNEATNLRIKYLLEELKNDTFIKDVRPLSPIHQEKMRIYEQAVLGNLNKQDKDYDDIIKISKKEHPTNAELIRYKLWLEQRYCSPYTGKAISLSKLFTTAYEIEHIIPQSRYFDNSFNNKVICEAEVNKAKGNMLGYEFIKKQGGQKIYCTQLGKAVTILKEEAYKQFVNEHYAHNKRKRDNLLAENIPESFSSRQLNDTRYITKTIMSLLSNVVRQQSEEEATAKNLLPSSGSVTDRLKNDWGLKDVWNTIVTPRFERLNKLSGTNDFGEMKEENGNRYFQTNVPLEYEKGFKKKRIDHRHHAMDALVIACTTRNMVNYISNANANSPKQREDLRQLLCDKNRIINKPWDTFTQDALKALNDIVVSFKNNVRIINRATNRYQRYDKNGKKIIFSQKGDDMWAIRKSMHKETVFGRVNLIRKEVLPIAKALDNISAICNAQLRAYVNDLVDKHFNKKQLVAHFKSLNYKWNRQDVSKVEVWISSDNKTPMVAVRKPLDTSFDKKKIASITDTGIQTILLNYLESKGGDASVAFAPEGIQEMNSNIELYNNGKAHKPIKNVRLSEPLGAKYQVGERGAKTKKYVEADKGTNLFFAIYEDEEGKRYYYSVPLREAIERQKQKLSPVPEYNEKGVALKFYLSPNDLVYVPTEEERTMGTCHIDKARIYKMVSSTGCSCYFVPSTFAKVIVDKVELQSLNKMEKAITDECIKEVCWKLKVDRLGNIINVIK

SEQ ID NO: 396 - protein, 1218 aa, Prevotella timonensis
  source 1..1218: note = CRIS 5C-B1
MNKRILGLDTGTNSLGWAVVDWDEHAQSYELIKYGDVIFQEGVKIEKGIESSKAAERSGYKAIRKQYFRRRLRKIQVLKVLVKYHLCPYLSDDDLRQWHLQKQYPKSDELMLWQRTSDEEGKNPYYDRHRCLHEKLDLTVEADRYTLGRALYHLTQRRGFLSNRLDTSADNKEDGVVKSGISQLSTEMEEAGCEYLGDYFYKLYDAQGNKVRIRQRYTDRNKHYQHEFDAICEKQELSSELIEDLQRAIFFQLPLKSQRHGVGRCTFERGKPRCADSHPDYEEFRMLCFVNNIQVKGPHDLELRPLTYEEREKIEPLFFRKSKPNFDFEDIAKALAGKKNYAWIHDKEERAYKFNYRMTQGVPGCPTIAQLKSIFGDDWKTGIAETYTLIQKKNGSKSLQEMVDDVWNVLYSFSSVEKLKEFAHHKLQLDEESAEKFAKIKLSHSFAALSLKAIRKFLPFLRKGMYYTHASFFANIPTIVGKEIWNKEQNRKYIMENVGELVFNYQPKHREVQGTIEMLIKDFLANNFELPAGATDKLYHPSMIETYPNAQRNEFGILQLGSPRTNAIRNPMAMRSLHILRRVVNQLLKESIIDENTEVHVEYARELNDANKRRAIADRQKEQDKQHKKYGDEIRKLYKEETGKDIEPTQTDVLKFQLWEEQNHHCLYTGEQIGITDFIGSNPKFDIEHTIPQSVGGDSTQMNLTLCDNRFNREVKKAKLPTELANHEEILTRIEPWKNKYEQLVKERDKQRTFAGMDKAVKDIRIQKRHKLQMEIDYWRGKYERFTMTEVPEGFSRRQGTGIGLISRYAGLYLKSLFHQADSRNKSNVYVVKGVATAEFRKMWGLQSEYEKKCRDNHSHHCMDAITIACIGKREYDLMAEYYRMEETFKQGRGSKPKFSKPWATFTEDVLNIYKNLLVVHDTPNNMPKHTKKYVQTSIGKVLAQGDTARGSLHLDTYYGAIERDGEIRYVVRRPLSSFTKPEELENIVDETVKRTIKEAIADKNFKQAIAEPIYMNEEKGILIKKVRCFAKSVKQPINIRQHRDLSKKEYKQQYHVMNENNYLLAIYEGLVKNKVVREFEIVSYIEAAKYYKRSQDRNIFSSIVPTHSTKYGLPLKTKLLMGQLVLMFEENPDEIQVDNTKDLVKRLYKVVGIEKDGRIKFKYHQEARKEGLPIFSTPYKNNDDYAPIFRQSINNINILVDGIDFTIDILGKVTLKE

SEQ ID NO: 397 - protein, 1496 aa, Prevotella veroralis
  source 1..1496: note = F0319
MKTILGLDLGTNSIGWAKVCVDDNGNYLRDIKLGSRIIPMSQDVLGNFDKGVTESQTSVRTGFRGVRRIRERSLLRRERLHRVLHVLGYLPPHYDSAIGWNKNEPSTYGKFLNHGEPKLAWEHKEDGSMRFLFMESFHEMMADFAKSQPSLVSDGKKIPLDWTIYYLRKKALSQPIRKEELAWLLLNFNQKRGYYQLRGEEDDDNPTKCEEYYELKVVGIEADEEGKNGNTWYNVKLENGWIYRRQSKIPLDDWIGKVREFIVTTEYEKDGITLKKDKNGDVKRSFRSPSEDDWGLRKKRTEKLLDSSKMTVGAFVYDHLLAEPSDKIRGKFIRTIERKYYKKELYAILCEQSKYHEELRSGDYLNKCAEELYKNNQPHRNSLLTKDLAYLLLEDLIFYQRPLKTKKSLIAECPYEAYKYVDKETGEIKRQGIKCIAKSNPYYQEFRLWQFISNLRLFNKADDKEVTADYLPTQDDYVRLFAYLNDRKEINQETLLKEFFKLKKITVNSEKVFPIRWNYIEDKEKKYPCNETRHELLLALDRARIDHSWLEKPGQEYRLWHLLYSVESKEETKEALRKLKDDDAFVESFLKVKPFKREYGAYSEKAIKKLLAVMRMGSLWRETDICDTTKGNITKILQGEIDEKLKEKISASVSSYNQLSDFQGLPVWLACYVVYGRHSEAAEIQHWKTPESLLAYINGFKQHSLRNPIVEQCILETLRTVHDIWKEVGHIDEIHVELGRNMKSTADQRARISENVLRNENTNLRIKSLLLELKNDPNIKDVRPYSPMQQEKLRIYEEGVLQELTKDDKDFTEITKISTMAQPSAKELQRYKLWLEQKYRSPYTGKSISLTKLFTSAYQIEHVIPQSRYFDDSFSNKVICESEVNSLKDNMLGYEFIKNHGGEIIHCTMLGDVKVLSESEYKAFVNDHYAHNKRKRENLLLEDIPQEFLNRQMNDSRYISKVVKALLSNIVRAEGEEEATSKFVVSCSGGITDRLKKDWGLNDVWNKIVYPRFERLNRLTGTEAFGQWENKDGKRVFQTAVPLELQRGFNKKRIDHRHHAMDALVIACTSRNIINYLNNESANNPKKREDLRQKLCDKNRTIRKPWETFTQDATAALEDVIVSFKNYVRIINKATNYYERYDVEGKKVIAEQRGDDMWAIRKPMHEATYYGRVNLRRKKKVNLRVALENISSICDNKLRIYINGLVEKGFNTKQILDKFKNTNDHFSMQKIDKVEIWQFTNEEEKLVATRKPLDTSFDTKKIASITDTGIQTILLNYLETKGGDSTIAFTPEGIVEMNQNISKYNNGKEHMPILKVRLYTKLGKKIPVGQTGCKAKQFVIAEAGTNLYFAIYEDEEGKRSYRTIPLNEVVERLKQGLSPVPEKNDKDVHLKFYLSPNDLVYVPIEDEHESLAKDHIYKFVDSSGTTANFIPHRSANVIFELNKKDAEKFCSGSIIQNEYGVGSSQSKNQKAITGEMIKAVCRKLEVDRLGNVIKVI

SEQ ID NO: 398 - protein, 1062 aa, Ralstonia syzygii
  source 1..1062: note = R24
MAEKQHRWGLDIGTNSIGWAVIALIEGRPAGLVATGSRIFSDGRNPKDGSSLAVERRGPRQMRRRRDRYLRRRDRFMQALINVGLMPGDAAARKALVTENPYVLRQRGLDQALTLPEFGRALFHLNQRRGFQSNRKTDRATAKESGKVKNAIAAFRAGMGNARTVGEALARRLEDGRPVRARMVGQGKDEHYELYIAREWIAQEFDALWASQQRFHAEVLADAARDRLRAILLFQRKLLPVPVGKCFLEPNQPRVAAALPSAQRFRLMQELNHLRVMTLADKRERPLSFQERNDLLAQLVARPKCGFDMLRKIVFGANKEAYRFTIESERRKELKGCDTAAKLAKVNALGTRWQALSLDEQDRLVCLLLDGENDAVLADALREHYGLTDAQIDTLLGLSFEDGHMRLGRSALLRVLDALESGRDEQGLPLSYDKAVVAAGYPAHTADLENGERDALPYYGELLWRYTQDAPTAKNDAERKFGKIANPTVHIGLNQLRKLVNALIQRYGKPAQIVVELARNLKAGLEEKERIKKQQTANLERNERIRQKLQDAGVPDNRENRLRMRLFEELGQGNGLGTPCIYSGRQISLQRLFSNDVQVDHILPFSKTLDDSFANKVLAQHDANRYKGNRGPFEAFGANRDGYAWDDIRARAAVLPRNKRNRFAETAMQDWLHNETDFLARQLTDTAYLSRVARQYLTAICSKDDVYVSPGRLTAMLRAKWGLNRVLDGVMEEQGRPAVKNRDDHRHHAIDAVVIGATDRAMLQQVATLAARAREQDAERLIGDMPTPWPNFLEDVRAAVARCVVSHKPDHGPEGGLHNDTAYGIVAGPFEDGRYRVRHRVSLFDLKPGDLSNVRCDAPLQAELEPIFEQDDARAREVALTALAERYRQRKVWLEELMSVLPIRPRGEDGKTLPDSAPYKAYKGDSNYCYELFINERGRWDGELISTFRANQAAYRRFRNDPARFRRYTAGGRPLLMRLCINDYIAVGTAAERTIFRVVKMSENKITLAEHFEGGTLKQRDADKDDPFKYLTKSPGALRDLGARRIFVDLIGRVLDPGIKGD

SEQ ID NO: 399 - protein, 1066 aa, Rhodopseudomonas palustris
MSERVVRRILGIDLGIASCGWGVVDISGAGGGIIATGVRCFDAPLIDKTGEPKSATRRTARGQRRIVRRRRQRMNGVRRLLCEFGLLPDPRPDALNQAMRRISTASAAAQVTPWTLRAAAHQRLLSNEELAVVLGHIARHRGFRSNAKNEAGANAADETSKMKKAMEATREGLAKYHAFGDMIANDPKFANRKRNRDKDYSHTAKRSDLEDEVRAILRAQLRFGSAAATETLAQTFADVAFFQRPLQDSEDRVGDCPFEPGQKRAARRAPSFELFRFLSRLANLKLAVGRSPERRLTAEEIALAAKGFGETKKTITFKSLREALDLDPNARFSGIGKDKEASLDVVARTGGAAYGTKTLKDALGDAPWRSLSRTPETLDRIAEILSFREDITSIRNGLEDLGLDSLVVEALMQAAANGDFKEFTRAGHISARAARNIIPGLREGLVYSEACARVGYDHAARLSVPLDQVGSPVTRKALSEALKQVRAVAREYGPIDYFHIELARSVGKSAEERKQLTDGIEARNVEKAKRRKQAEEHLGRAPSDDELLRYELAKEQNFKCIYSGDAIDPAGVAANDTRYQVDHILPWSRFGDDSYLNKTLCTARSNQNKRGRTPFEWFEADKTDVEWMEYVARVENLQEVKGRKKRNYSIKDAAAIEDKFKARNLTDTQWATRLLADELSRMFPPRECERAICGRADGGNDGLTIVEERRVFTRPGAITSKLRRAWGLEGLKKQDGKRVEDDRHHAVDALVLAATTESLLQRLTVEVQRREREGRPDDIFHCAEPWRGFRADVRRTVYGSETMPGIFVSRAERRRARGKAHDATIKQIREIEGERLVFERKPVEKLTDKDLEKIPIPKPYGQVSDPKRLRDELVESLRAWIAAGKPKDRPPLSPKGDVIRKVRIQTNDKVSVEINGGTVDRGDMARVDVFRKKNKKAVWEYYVVPIYPHQIVALNDPPDRAVIAYAEDKDWKEIDSSYEFLWSLFGLSYVEISKANGECIDGYFRGLHRGTGAASVCKHISLGKDATVSGIGLKTLASFKKFTIDRLGRKFEIPREVRTWRGEACT

SEQ ID NO: 400 - protein, 1064 aa, Rhodopseudomonas palustris
MSECVTRRILGIDLGIASCGWGVIEVGEASGSIIASGVRCFDAPLIDKTGEPKSATRRTARGQRRIIRRRRQRMNAVRRLLAEFGVLTGRSPDALHQALLRLSQSVAGSQVTPWTLRAAAHERKLTNDELAVVLGHIARHRGFRSNSKNDGGANAADETSKMKKAMETTREGLARYHSFGAMIASDPKFADRKRNRDKDYSHTAKRSDLEDEVRTIFRSQTRFGSLVASEKLSQAFADAAFFQRPLQDSEDMVGSCPFEPGQKRTARRAPSFELFRFLSRLANLKLTVGRAPERRLTPDEIALAAKGFGETKKSITFKSLREALDLDPNARFSGVAKEKESTLDVAARTGGAAYGTKTLKDALGDAPWRSLSRMPEKLDRIAEILSFREDMKAIRNGLEEVGLDGLVVDALMQATANGDFKDFTRAAHISALAARNIIPGLREGLVYSDACTRVGYDHAARPAVPLSQIGSPVTRKALSEALKQVRAVAREYGPIDYFHIELARSIGKSAEERKKLTDGIEARNVEKEKRRKEAAEHLGRAPSDDELLRYELAKEQNFKCIYSGDPIDPAGISANDTRYQVDHILPWSRFGDDSYVNKTLCTARSNQNKRGRTPFEWFDADKTEAEWMEYSARVEDLKEVKGRKKRNYSIKDAASVEDKFKARNLTDTQWATRLLADELKRMFPPRECERVVTVRADGGNDGLSIVEERRVFTRPGAITSKLRRAWGLEGLKKQDGKRVEDDRHHAVDALVLAATTESLLNRLTVEVQQREREGRQDDIFHCSQPWPGFRVDVQRTVYGSETMPGIFVSRAERRRARGKAHDATVKQIRDIDGERIVFERKPIEKLTDKDLERIPVPEPYGKAADPKKLRDELVENLRAWIAAGKPKDKPPRSPKGDIIRKVRIETKDKVAVEINGGTVDRGDMARVDVFRKKNKKGVWEFYVIPIYPHQIVASALPPNRAVIAYKAESEWTAIDGCFEFAWSLNPMSYLELVKSNGELIEGYFRSMDRTTGAINLSPMSTNSETIRSIGVKTLSSFRKFTVDRLGRKFEIPREVRTWRGEACT

SEQ ID NO: 401 - protein, 1173 aa, Rhodospirillum rubrum
  source 1..1173: note = ATCC 11170
MRPIEPWILGLDIGTDSLGWAVFSCEEKGPPTAKELLGGGVRLFDSGRDAKDHTSRQAERGAFRRARRQTRTWPWRRDRLIALFQAAGLTPPAAETRQIALALRREAVSRPLAPDALWAALLHLAHHRGFRSNRIDKRERAAAKALAKAKPAKATAKATAPAKEADDEAGFWEGAEAALRQRMAASGAPTVGALLADDLDRGQPVRMRYNQSDRDGVVAPTRALIAEELAEIVARQSSAYPGLDWPAVTRLVLDQRPLRSKGAGPCAFLPGEDRALRALPTVQDFIIRQTLANLRLPSTSADEPRPLTDEEHAKALALLSTARFVEWPALRRALGLKRGVKFTAETERNGAKQAARGTAGNLTEAILAPLIPGWSGWDLDRKDRVFSDLWAARQDRSALLALIGDPRGPTRVTEDETAEAVADAIQIVLPTGRASLSAKAARAIAQAMAPGIGYDEAVTLALGLHHSHRPRQERLARLPYYAAALPDVGLDGDPVGPPPAEDDGAAAEAYYGRIGNISVHIALNETRKIVNALLHRHGPILRLVMVETTRELKAGADERKRMIAEQAERERENAEIDVELRKSDRWMANARERRQRVRLARRQNNLCPYTSTPIGHADLLGDAYDIDHVIPLARGGRDSLDNMVLCQSDANKTKGDKTPWEAFHDKPGWIAQRDDFLARLDPQTAKALAWRFADDAGERVARKSAEDEDQGFLPRQLTDTGYIARVALRYLSLVTNEPNAVVATNGRLTGLLRLAWDITPGPAPRDLLPTPRDALRDDTAARRFLDGLTPPPLAKAVEGAVQARLAALGRSRVADAGLADALGLTLASLGGGGKNRADHRHHFIDAAMIAVTTRGLINQINQASGAGRILDLRKWPRTNFEPPYPTFRAEVMKQWDHIHPSIRPAHRDGGSLHAATVFGVRNRPDARVLVQRKPVEKLFLDANAKPLPADKIAEIIDGFASPRMAKRFKALLARYQAAHPEVPPALAALAVARDPAFGPRGMTANTVIAGRSDGDGEDAGLITPFRANPKAAVRTMGNAVYEVWEIQVKGRPRWTHRVLTRFDRTQPAPPPPPENARLVMRLRRGDLVYWPLESGDRLFLVKKMAVDGRLALWPARLATGKATALYAQLSCPNINLNGDQGYCVQSAEGIRKEKIRTTSCTALGRLRLSKKAT

SEQ ID NO: 402 - protein, 1059 aa, Rhodovulum sp.
  source 1..1059: note = PH10
MGIRFAFDLGTNSIGWAVWRTGPGVFGEDTAASLDGSGVLIFKDGRNPKDGQSLATMRRVPRQSRKRRDRFVLRRRDLLAALRKAGLFPVDVEEGRRLAATDPYHLRAKALDESLTPHEMGRVIFHLNQRRGFRSNRKADRQDREKGKIAEGSKRLAETLAATNCRTLGEFLWSRHRGTPRTRSPTRIRMEGEGAKALYAFYPTREMVRAEFERLWTAQSRFAPDLLTPERHEEIAGILFRQRDLAPPKIGCCTFEPSERRLPRALPSVEARGIYERLAHLRITTGPVSDRGLTRPERDVLASALLAGKSLTFKAVRKTLKILPHALVNFEEAGEKGLDGALTAKLLSKPDHYGAAWHGLSFAEKDTFVGKLLDEADEERLIRRLVTENRLSEDAARRCASIPLADGYGRLGRTANTEILAALVEETDETGTVVTYAEAVRRAGERTGRNWHHSDERDGVILDRLPYYGEILQRHVVPGSGEPEEKNEAARWGRLANPTVHIGLNQLRKVVNRLIAAHGRPDQIVVELARELKLNREQKERLDRENRKNREENERRTAILAEHGQRDTAENKIRLRLFEEQARANAGIALCPYTGRAIGIAELFTSEVEIDHILPVSLTLDDSLANRVLCRREANREKRRQTPFQAFGATPAWNDIVARAAKLPPNKRWRFDPAALERFEREGGFLGRQLNETKYLSRLAKIYLGKICDPDRVYVTPGTLTGLLRARWGLNSILSDSNFKNRSDHRHHAVDAVVIGVLTRGMIQRIAHDAARAEDQDLDRVFRDVPVPFEDFRDHVRERVSTITVAVKPEHGKGGALHEDTSYGLVPDTDPNAALGNLVVRKPIRSLTAGEVDRVRDRALRARLGALAAPFRDESGRVRDAKGLAQALEAFGAENGIRRVRILKPDASVVTIADRRTGVPYRAVAPGENHHVDIVQMRDGSWRGFAASVFEVNRPGWRPEWEVKKLGGKLVMRLHKGDMVELSDKDGQRRVKVVQQIEISANRVRLSPHNDGGKLQDRHADADDPFRWDLATIPLLKDRGCVAVRVDPIGVVTLRRSNV

SEQ ID NO: 403 - protein, 1405 aa, Riemerella anatipestifer
MKTILGLDLGTNSIGWALVKEAENSNEKSEIIKLGVRVNPLTVDEKTNFEAGRPLSTNADRTAKRSARRNLQRYKLRRKNLIDLLIKNQLIDKDTPLTEIGKNTTHQTLELRAKAARERIELEDLARVFLAINKKRGYRSSRKVNNEEEGQAVDGMAVAKKLYDENLTPGQYAYELLSKGKKYVPDFYRSDLQAEFNAIWEYQKQFYADILDDELYNALKGQGQQNSRKRFLAIKGVYTAENKGKRDDVKLRHYKWRSEAISKKINIEEVAYVLVEINNDLNKSSGYLGAISDRSKELYFNKETVGENLWKQIQKNPHTSLKNQVFYRQDYLDEFEQIWETQAQFHPQLTLALKEQIRDVIIFYQRKLKSQKGLLSFCQFESWEIERKDENGNVILNKTTQLPKRQTVGRRVAPKSSPLFQEFKIWQNINNLEVTKISEGASKNKKETETLSDDERKLLFEELNLRGNLSQKEVLQILGLKDKEYKTNFSEGLEGNRTNAALFNIYQQIAENEGYGFDWSKKSAQEIKEELKAVFPQIGIQADILDFNANLDGKEFENQASYQLWHLLYSAEEDDKINEEDQIIYGNSAVSLKKKLCEKFGFTPEYAKWIANVSLQDDYGNLSTKAMRKIIPYLIDGNDYSEACALAGYNHSNSLTKEENDNRELLDKLELLPKNSLRNPVVEKILNQMVNVVNQVIETYGKPDEVRIELARELKKSAEKRAEMTKSINEATRRNEDIKKLITKDFGIPNPTKSDVVRYRLWEELAPLAYKDVFTGKQIKKEDLFSSKIDIEHIIPKALLFDDSFSNKTLVFRETNLKKADRTAYDFIESDYNATLDDYIQRVETLYNNTKGTISKGKRNKLLMAQKNLPDGFIERDLRNSQYIAKKAKAMLYQVFKDVNVTSGSITDRLREDWDLINVMKELNFPKYKALGLTEIEERYDIGQEKTKRVEVITDWTKRNDHRHHAMNALTVAFTTSSHIQYLNYLNARKNESHKEHKNIKGIENKITHKQKDKRKFIPPMPNFREEAKKHIETILVSIKNKNKVYTKNINKTKKKSGHNTKEQLTPRGQLHKETVYGKSKRPMSKPTKINKNFSLEQAQLIINVQEKELVLRHLAQFDNNPAVAFDTKTLKKMPLLKNGEPLKEVLCFEEIFTIRKDITPDLKIEKVVDEKIKAILEQRKKDFGGNAKEAFSDLDKNPIWLNKKKGICIKRVTITGVSNAEALHHQKDHLGREILDDNGNPIPADFVSTGNNHHLAVYLDSEGKLQDNIVSFYEAVVRTSQGLPVVDKGLNKDLGWKFLFSLKQNEMFVFPNDDFDINDFDLLDDKKAELISKHLYRVQKISKVSAGNSFVRDIVFRHHLETTVKEVKELKDISYIQLKSLEGLRNIKKVRINHIGKIVQVGEY

SEQ ID NO: 404 - protein, 1400 aa, Riemerella anatipestifer
MKTILGLDLGTNSIGWALVKETENSNEKSEIIKLGVRVNPLTVDEKTNFEAGRPLSTNADRTAKRSARRNLQRYKLRRKNLIDLLIKHRLIDKDTPLTEIGKNTTHQTLELRAKAARERIELEDLARVFLAINKKRGYRSSRKVNNEEEGQVVDGMAVAKKLYDENLTPGQYAYELLSKGKKYVPDFYRSDLQAEFDSIWEYQKQFYADILDDELYNALKGQGQQNSRKRFLAIKGVYTAENKGKRDEVKLQHYKWRSEAITQKLSIEEVAYVLVEINNDLNKSSGYLGAISDRSKELYFNKETVGENLWKQIQKNPHTSLKNQVFYRQDYLDEFEQIWETQAQFHPQLTLALKEQIRDVVIFYQRKLKSQKGLLSFCQFESWEIERKDENGNVILNKTTQLPKRQTVGRRVAPKSSPLFQEFKIWQNINNLEIAKISDGNSKNKKETEALSDDERKLLFEELNLRGNLSQKEVLQILGLKDKEYKTNFPEGLEGNRTNAALFNIYQQIAENEGYGDWTKKSAQEIKEELKAVFPQIGIQADILDFNAELDGKEFENQASYQLWHLLYSAEEDDKINEEDQIIYGNSAVSLKKKLCEKFGFTPEYAKWIANVSLQDDYGNLSTKAMRKIIPYLIDGNDYSEACALAGYNHSNSLTKEENDNRERLNKLELLPKNSLRNPVVEKILNQMVNVVNQVIETYGKPDEVRIELARELKKSAEERAEMTKGINEATRRNEDIKKLITKNFGIPNPTKNDVVRYRLWEELAPLAYKDVFTGRQIKKEDLFSSKIDIEHIIPKALLFDDSFSNKTLAFRETNLKKADRTAYGFIESDYNATLDDYIQRVETLYNNAKGTISKGKRNKLLMAQKNLPDGFIERDLRNSQYIAKKAKSMIEKVFNDVNVTSGSITDRLREDWDLINVMKELNFPKYKALGLTEIEERYDIGQEKTKKVEVITDWTKRNDHRHHAMDALTVAFTTKSHVQYLNNLNTIHSLKGDEVDLELSKLYGLKNTITEVVNKKRKFIPPMPNFREEAKKHIETILVSIKNKNKVYTKNINKTKKESGYHTKEQLTPRGQLHKETVYGKSKRPMNKPTKINKNFSLEQAQLIINVQEKELVLRHLAQFDNNPAVAFDTKTLKKMPLLKNGEPLKEVLCFEEIFTIRKDITPDLKIEKVVDEKIKAILEQRKKDFGGNAKEAFSDLDKNPIWLNKEKGICIKRVTITGVSNAEALHHQKDHLGREILDDNGNPIPADFVSTGNNHHVAIYEDEKGKLQEKVVSLYEAVARANQGLPVVDKGLNEDLGWKFLFTMKQNEMFVFPNDDFDVNDIDLLDENNAKIISQHLFRVQKLATKNYMFRHHLETNVQEVKELNDIAYKSIRSTEPLKNIKKVRINHIGKIVQVGEY

SEQ ID NO: 405 - protein, 1140 aa, Roseburia intestinalis
  source 1..1140: note = L1-82
MRENGSDERRRNMDEKMDYRIGLDIGIASVGWAVLQNNSDDEPVRIVDLGVRIFDTAEIPKTGESLAGPRRAARTTRRRLRRRKHRLDRIKWLFENQGLINIDDFLKRYNMAGLPDVYQLRYEALDRKLTDEELAQVLLHIAKHRGFRSTRKAETAAKENGAVLKATDENQKRMQEKGYRTVGEMIYLDEAFRTGCSWSEKGYILTPRNKAENYQHTMLRAMLVEEVKEIFSSQRRLGNEKATEELEEKYLEIMTSQRSFDLGPGMQPDGKPSPYAMEGFSDRVGKCTFLGDQGELRGAKGTYTAEYFVALQKINHTKLVNQDGETRNFTEEERRALTLLLFTQKEVKYAAVRKKLGLPEDILFYNLNYKKAATKEEQQKENQNTEKAKFIGMPYYHDYKKCLEERVKYLTENEVRDLFDEIGMILTCYKNDDSRTERLAKLGLVPIEMEGLLAYTPTKFQHLSMKAMRNIIPFLEKGMTYDKACEEAGYDFKADSKGTKQKLLTGENVNQTINEITNPVVKRSVSQTVKVINAIIRTYGSPQAINIELAREMSKTFEERRKIKGDMEKRQKNNEDVKKQIQELGKLSPTGQDILKYRLWQEQQGICMYSGKTIPLEELFKPGYDIDHILPYSITFDDSFRNKVLVTSQENRQKGNRTPYEYMGNDEQRWNEFETRVKTTIRDYKKQQKLLKKHFSEEERSEFKERNLTDTKYITTVIYNMIRQNLEMAPLNRPEKKKQVRAVNGAITAYLRKRWGLPQKNRETDTHHAMDAVVIACCTDGMIQKISRYTKVRERCYSKGTEFVDAETGEIFRPEDYSRAEWDEIFGVHIPKPWETFRAELDVRMGDDPKGFLDTHSDVALELDYPEYIYENLRPIFVSRMPNHKVTGAAHADTIRSPRHFKDEGIVLTKTALTDLKLDKDGEIDGYYNPQSDLLLYEALKKQLLLYGNDAKKAFAQDFHKPKADGTEGPVVRKVKIQKKQTMGVFVDSGNGIAENGGMVRIDVFRVNGKYYFVPVYTADVVKKVLPNRASTAHKPYGEWKVMEDKDFLFSLYSRDLIHIKSKKDIPIKMVNGGMEGIKETYAYYIGADISAANIQGIAHDSRYKFRGLGIQSLDVLEKCQIDVLGHVSVVRSEKRMGFS

SEQ ID NO: 406 - protein, 1128 aa, Roseburia intestinalis
  source 1..1128: note = M50/1
MDEKMDYRIGLDIGIASVGWAVLQNNSDDEPVRIVDLGVRIFDTAEIPKTGESLAGPRRAARTTRRRLRRRKHRLDRIKWLFENQGLINIDDFLKRYNMAGLPDVYQLRYEALDRKLTDEELAQVLLHIAKHRGFRSTRKAETAAKENGAVLKATDENQKRMQEKGYRTVGEMIYLDEAFRIGCSWSEKGYILTPRNKAENYQHTMLRAMLVEEVKEIFSSQRRLGNKKATEELEEKYLEIMTSQRSFDLGPGMQPDGKPSPYAMEGFSDRVGKCTFLGDQGELRGAKGTYTAEYFVALQKINHTKLVNQDGETRNFTEEERRALTLLLFTQKEVKYAAVRKKLGLPEDILFYNLNYKKAATKEEQQKENQNTEKAKFIGMPYYHDYKKCLEERVKYLTENEVRDLFDEIGMILTCYKNDDSRTERLAKLGLVPIEMEGLLAYTPTKFQHLSMKAMRNIIPFLEKGMTYDKACEEAGYDFKADSKGTKQKLLTGENVNQTINEITNPVVKRSVSQTVKVINAIIRTYGSPQAINIELAREMSKTFEERRKIKGDMEKRQKNNEDVKKQIQELGKLSPTGQDILKYRLWQEQQGICMYSGKTIPLEELFKPGYDIDHILPYSITFDDSFRNKVLVTSQENRQKGNRTPYEYMGNDEQRWNEFETRVKTTIRDYKKQQKLLKKHFSEEERSEFKERNLTDTKYITTVIYNMIRQNLEMAPLNRPEKKKQVRAVNGAITAYLRKRWGLPQKNRETDTHHAMDAVVIACCTDGMIQKISRYTKVRERCYSKGTEFVDAETGEIFRPEDYSRAEWDEIFGVHIPKPWETFRAELDVRMGDDPKGFLDTHSDVALELDYPEYIYENLRPIFVSRMPNHKVTGAAHADTIRSPRHFKDEGIVLTKTALTDLKLDKDGEIDGYYNPQSDLLLYEALKKQLLLYGNDAKKAFAQDFHKPKADGTEGPVVRKVKIQKKQTMGVFVDSGNGIAENGGMVRIDVFRVNGKYYFVPVYTADVVKKVLPNRASTANKPYSEWRTMEDKDFLFSLYSRDLVHIKSKKGIPIKNVDGSLGESKEVYAYYIGADISGAKIEGKAHDSRYTFRGIGVQKLELIEKCQVDILGHISTVKNEKRMGFS

SEQ ID NO: 407 - protein, 1152 aa, Roseburia inulinivorans
  source 1..1152: note = DSM 16841
MNAEHGKEGLLIMEENFQYRIGLDIGITSVGWAVLQNNSQDEPVRITDLGVRIFDVAENPKNGDALAAPRRDARTTRRRLRRRRHRLERIKFLLQENGLIEMDSFMERYYKGNLPDVYQLRYEGLDRKLKDEELAQVLIHIAKHRGFRSTRKAETKEKEGGAVLKATTENQKIMQEKGYRTVGEMLYLDEAFHTECLWNEKGYVLTPRNRPDDYKHTILRSMLVEEVHAIFAAQRAHGNQKATEGLEEAYVEIMTSQRSFDMGPGLQPDGKPSPYAMEGFGDRVGKCTFEKDEYRAPKATYTAELFVALQKINHTKLIDEFGTGRFFSEEERKTIIGLLLSSKELKYGTIRKKLNIDPSLKFNSLNYSAKKEGETEEERVLDTEKAKFASMFWTYEYSKCLKDRTEEMPVGEKADLFDRIGEILTAYKNDDSRSSRLKELGLSGEEIDGLLDLSPAKYQRVSLKAMRKMQPYLEDGLIYDKACEAAGYDFRALNDGNKKHLLKGEEINAIVNDITNPVVKRSVSQTIKVINAIIQKYGSPQAVNIELAREMSKNFQDRTNLEKEMKKRQQENERAKQQIIELGKQNPTGQDILKYRLWNDQGGYCLYSGKKIPLEELFDGGYDIDHILPYSITFDDSYRNKVLVTAQENRQKGNRTPYEYFGADEKRWEDYEASVRLLVRDYKKQQKLLKKNFTEEERKEFKERNLNDTKYITRVVYNMIRQNLELEPFNHPEKKKQVWAVNGAVTSYLRKRWGLMQKDRSTDRHHAMDAVVIACCTDGMIHKISRYMQGRELAYSRNFKFPDEETGEILNRDNFTREQWDEKFGVKVPLPWNSFRDELDIRLLNEDPKNFLLTHADVQRELDYPGWMYGEEESPIEEGRYINYIRPLFVSRMPNHKVTGSAHDATIRSARDYETRGVVITKVPLTDLKLNKDNEIEGYYDKDSDRLLYQALVRQLLLHGNDGKKAFAEDFHKPKADGTEGPVVRKVKIEKKQTSGVMVRGGTGIAANGEMVRIDVFRENGKYYFVPVYTADVVRKVLPNRAATHTKPYSEWRVMDDANFVFSLYSRDLIHVKSKKDIKTNLVNGGLLLQKEIFAYYTGADIATASIAGFANDSNFKFRGLGIQSLEIFEKCQVDILGNISVVRHENRQEFH

SEQ ID NO: 408 - protein, 1156 aa, Ruminococcus albus 8
MGNYYLGLDVGIGSIGWAVINIEKKRIEDFNVRIFKSGEIQEKNRNSRASQQCRRSRGLRRLYRRKSHRKLRLKNYLSIIGLTTSEKIDYYYETADNNVIQLRNKGLSEKLTPEEIAACLIHICNNRGYKDFYEVNVEDIEDPDERNEYKEEHDSIVLISNLMNEGGYCTPAEMICNCREFDEPNSVYRKFHNSAASKNHYLITRHMLVKEVDLILENQSKYYGILDDKTIAKIKDIIFAQRDFEIGPGKNERFRRFTGYLDSIGKCQFFKDQERGSRFTVIADIYAFVNVLSQYTYTNNRGESVFDTSFANDLINSALKNGSMDKRELKAIAKSYHIDISDKNSDTSLTKCFKYIKVVKPLFEKYGYDWDKLIENYTDTDNNVLNRIGIVLSQAQTPKRRREKLKALNIGLDDGLINELTKLKLSGTANVSYKYMQGSIEAFCEGDLYGKYQAKFNKEIPDIDENAKPQKLPPFKNEDDCEFFKNPVVFRSINETRKLINAIIDKYGYPAAVNIETADELNKTFEDRAIDTKRNNDNQKENDRIVKEIIECIKCDEVHARHLIEKYKLWEAQEGKCLYSGETITKEDMLRDKDKLFEVDHIVPYSLILDNTINNKALVYAEENQKKGQRTPLMYMNEAQAADYRVRVNTMFKSKKCSKKKYQYLMLPDLNDQELLGGWRSRNLNDTRYICKYLVNYLRKNLRFDRSYESSDEDDLKIRDHYRVFPVKSRFTSMFRRWWLNEKTWGRYDKAELKKLTYLDHAADAIIIANCRPEYVVLAGEKLKLNKMYHQAGKRITPEYEQSKKACIDNLYKLFRMDRRTAEKLLSGHGRLTPIIPNLSEEVDKRLWDKNIYEQFWKDDKDKKSCEELYRENVASLYKGDPKFASSLSMPVISLKPDHKYRGTITGEEAIRVKEIDGKLIKLKRKSISEITAESINSIYTDDKILIDSLKTIFEQADYKDVGDYLKKTNQHFFTTSSGKRVNKVTVIEKVPSRWLRKEIDDNNFSLLNDSSYYCIELYKDSKGDNNLQGIAMSDIVHDRKTKKLYLKPDFNYPDDYYTHVMYIFPGDYLRIKSTSKKSGEQLKFEGYFISVKNVNENSFRFISDNKPCAKDKRVSITKKDIVIKLAVDLMGKVQGENNGKGISCGEPLSLLKEKN

SEQ ID NO: 409 - protein, 1341 aa, Ruminococcus lactaris
  source 1..1341: note = ATCC 29176
MGKGYYVGLDMGTGSVGWAVTDESYQILRRHGKAMWGVRLFESAKTAEERRMFRTGRRRLDRRGWRIEILQEIFAEEISRVDPGFFLRMKESKYYPEDKRDIQGNCPELPYTLFVDKTFTDKDFHKKYPTIYHLRKMLMETEDTPDMRLVYLALHHMMKHRGHFLLSGDISQVTEFKNTFNQFIENIRNEEMDFEIELDESAVQMIEETLKDKNLTRSAKKSKLVKGLNAKNVRDKAFLTLLSGGTVKLSDLFGMEELNEGERPKISFADNGYEEYAAVVEMELGELYYIVESAKAVYDWAILSDILGGSTSVSDAKVRAYEKHKADLKYLKAVVKEYFPKEVYNAVFVESSDKLNNYPAYIGMTKKNGKKVSLEGKRCSREEFMDFLKKNIVVKLPDEEAKMYLQSELEKDSFLPKQVNKDNGVIPYQVHKYELKKILDNLGDKIPFLKENAEKIEKLFSFRIPYYVGPLRTGNGENSKFAWAERKSTEKIYPWNFENVIDVEQSAENFIRRMTNKCTYLIGEDVLPKDSLLYSKFMVLNELNNLRLDGQKISVELKQKIYRDVFCRSRKVTQKKLKSYLIREGIAGKNVELTGIDGDFKGSLTAYHDFKEKLIDVELTQKEKEEIILNIVLFGDDKKLLKQRLKKKFPQLTEKQINTVTALSYKGWGRLSKKLLEEVTVPAPETGEVWNIITALWETNDNFMQLLSKEYQFSDRIEEFNEEKADPEVSYQTIEDLYVSPAVKRQIWQTLQIIQEIEKVMGEKPKRVFVEMAREKQENKRTESRKKTLSDLYTKCKKEEPEWIEALCTSLEKHEEHQLRSDKLYLYYTQKGRCMYSGEPIDLEDLWDNTKYDIDHIYPQSKTMDDSLKNRVLVKKEYNAKKSDTYPIAADIQKKMMPFWKSLLTGGFIPKEKYDRLVRNNPLDANELAGFIERQIVETRQSTKAVAEILKKILPDTEIVYVKAKTVSKFRQDFDFIKVRDMNDLHHAKDAYLNIVVGNVYFVKFTKNAAWFVKENPGRTYNLEKMFIWDVARDGEIAWKAGKSGSIVQVRAMMEKNHILVTRRSYEVKGGLFDQQILKKGKGQVPVKESDERLRDIGKYGGYNKAAGVYFMLVSSKDKKGKEQRTIEFVPIYLKDRVEKDMESARNYLMEERGLREPKILIKKIKIDTLFKVDGFYMWLSGRTSNQLIFKGANQLILSKEDMKTLKKVVKYIQRQKEDKNVKISMRDGITEEELLKLYETFLDKIRHSIYGARLSSQEKTLVNGKEKFIDLSVEAKCQVLYEILHLFQCQSGAANLKMIGGPASAGILVMNNNISKCKNISIVNQSPTGIYEKEIDLLRV

SEQ ID NO: 410 - protein, 1471 aa, Scardovia wiggsiae
  source 1..1471: note = F0424
MGYKAPRNDKGEIDYGVGLDLGNGSVGWVAMDKDYHLIRARGHELIGARLFDPANSAENRRESRTTRRRLSRRRWRLRMLDSLFASELAKIDPNFLARRKYSWVHPKDEQNHENWYGSIIFGSKEQDKQFYKDYPTIYHLRKKLTEDTERHDIREIYVAIHHIVKYRGHFLREGEINSENLFDPEGFVELIKDVIKLNNSYDESTPIFEASPADVSEALLNEHTSRSGRIEDTLDKLDFSVSRVDKHELKGMRDAAKAVIGAIVGNTADFSKIFNLDNLDKDSKDNLKLKFADSNFDEKYGGVVGSGLLDETQIELVDRIHAVYDAVALKGILGDAHTISEAKVESYEKHRKNWKLIKEELRTKENKDEVDLWYGDLSGRQYKNPPDPEKGPDEGSKKDSPIRDSDQKQNLIKKANDYFTELIDDSQLSEEQKNCLKNDINNGQLFPVQRSSDNGVIPYQIHLNELRRIIENQKQYYPFLAETFIRKTAEGKSYEENKIVALLKFRVPYYVGPLVSKEDMEEHSSGNSAYHWMARNPGRGEAITPWNFDEVVDKDESGARFISRLTGTDTYLLGEPTLPQHSLLYEEYMVLSELNNVRLNVRQGNHWSDKNRQRLSYKQKEFLIENLFKEHKTVTRKRAEDCLSSMGCGEVQLFGLSDEKKFASSLSSYITLKKILGKAFVDDSGNSAILERIIEVQTVFEDREPLTHQLSLIDSLTVEQRKQLAKIHYTGWGKLSRKLLTSKKGSYKIHSQNEIMRTQHSIIDIMRGDSLNLIEIIRDKKIGIGEWIDNENLDRETGESDVSRLESVFEGIVMSPRVKRGVVQAVRVIDDLAKAIGNPPQRIFIEMADEVQASQRTVSRLSRLKALYGSPSLQKEFNDLKDLRKSLNETKDADLQEDRLYLYYIQLGKDLYTGKEISIDSLSSAYDIDHIVPQALTQDDSIDNRVLVSRKENARKTDSYLYTPDLIKNMRPLWGKLLAAGLMSQKKYDALTRVDDFKDREKQRFVQRSLVETRQIMKNVSTILRTYYGEDTNVVTLKSSITHDMRKYLGFPYKNRDINDYHHAQDALCISAAGQFMLNRHFVSGGEVTDGASNAYNMYLAEYLQEFRDAKARGERKRSTAFGFVVGSMSSKDDEKRTDHRTGEIVWSETNAEYLRKVMNYKKMLITQKVGDVKTRALYDETRYGHKESSAKSIKFDNLRRDTSLYGGFSGASTAYMMLVEYKKKNKLVSITAQEASLLAVADQKNDTVSVMDGILASHGLSGAKILLPKIVTGQLLDYSDALVTLQSASELNTARQMWLPRNDYNDIDIILKSKDIEDAAHKLGYDSDTVHVLRRIQKLFEAVFRVAESQFPLHQLSKDQQEEILRDPQNYGFGSAVKLLGGLLKALHANAENTNLAGLVKVLHGDKEYSDDGKAKEFKKFGFSPRWRRISNPTGFTLSDSDTFIYQSPSGIFEQRVTVKELKEKADKQK

SEQ ID NO: 411 - protein, 1178 aa, Scardovia inopinata
  source 1..1178: note = F0304
MGKRHNSNMAKKKISYRIGIDVGLNSTGLAAIEVDDDGAPIRILNTMSVIHDGGVDPDAAKVRGTRLAISGIARRTRRMRRRRAKRLDRLEQILEKYGYTDTEPVLEEPYGPWICRAELADGFINDDEQRRMMIGIAIRHIARHRGWRNPYQNVRALLNIDDSDLSEEYKNLKEKVQDQINDGKDLPNFTPSQLVRDYLDNFSGQPAARIRTGKAGPRGNRRDAVGILPQRMRQSDYAYELQRIFDMQKIGRDEAQELLMAVFEAKSPKGSAEKRIGKDPLTGKKRALKASLAFQKYRIVATITNLRIKTGTGSERMLSPTELNDIYTYLLRVQDDNHLPTWEDICEEVLHIGRYQLAGIGKTFEGGERISNMPPVIQTSLAIHGLSEGTLAEKLTKWWDKADDDSRESMIKLLSNTVDIDRVNEVDENFASALDFIDSLDDEELTKLDKIALPRGRAAYSEEALNKLTADMLNTGDDLFSARQRIYHVNNSWRPPQPPIGEPLGNPAVDRVLKITNRYLMNCLNRWGQPRRVTIEHTRSGFTSVKQATEHQKISDKRAEYRRDIVKQLEEAGVESVHEYDIRRWEAVQRQNGQCLYCGRDITFKTCEMDHIVPRKGPGSTNTRTNFAAVCPECNRMKSNIPFASWAETKEAKDRGVSLDKAIKQVRFFNFTKNEYSPQAQRNFKKSMIERLKQKTSDEPLDNRSIESVSWMADELYKRIDWYFNHEQYETSKKAINDDKDNLSGTQVVVYPGSITAEARNAAGLGGNIHFIGGRYKTRLDRRHHAVDACVIAMMEPGIARILTERNQLRQAQRLTARIEDDEVNWKDYPTENTAGYNKYQAWSDRMHALLEYMNNALDYDKIPVVRWERLQLGNRSAHEDTIHPLKKLPLSHEISAIDINHASTPALYEALVSLPDFSEQDGLPADPSRQINVNGERYSGDDLVSFFNSNAAQIAIQGGSAELGTAFHHARIYRCWTVGKNGKKKIFFGMIRVYQHDLLHAKNEDLFTYPLKRSSVSMRYAKKEVVHAILSGNAEYVGYLCVGDELVLDLKGDKSNDEGGSRLSGQVGEFVQKFEEDSKVNSQIVNRWTVDGFPDEAKLRLRPSMFAGEGLKNMKSELVENAAIKNILSKTGWRVSVDVISKKSPVVLRRNAFGEPRWKTNAGLPVSYRWQDTETKE

SEQ ID NO: 412 - protein, 1063 aa, Simonsiella muelleri
  source 1..1063: note = ATCC 29453
MEKFHYVLGLDLGIASVGWAAIEIDKETETSIGLLDCGVRTFERAEVPKTGDSLAKARREARSTRRLIRRRSHRLLRLKRLLKREIFRQPETFKDLPINAWQLRVKGLDSRLNEYEWAAVLLHLVKHRGYLSQRKSEMSETDSKSEMGRLLAGVAENHQLLQQEQYRTPAELALKKFVKHFRNKGGDYAHTFNRLDLQAELHLLFQKQRELGNPFTSPELERQVDDLLMTQRSALQGDAILKMLGHCGFEPEQFKAAKNTFSAERFIWLTKLNNLRIQDQGKERALTADERTKLLDEPYKKSKLTYAQVRKLLSLPQTAIFKGLRYDLEHDKKAENSTLMEMKSYHNIRQTLEKSGLKTEWQSIATQPEILDAIGTAFSIYKTDEDISHELKTCRLPENVLNELLKNINFDGFIQLSLTALRKILPLMEQGYRYDEACTQIYGNHHSGSLQQESKQFLPHIPIDDVRNPVVFRTLTQARKVVNAIIRRYGSPARVHIEMARELGKSKSDRDRIEKQQQKNKKERENAVAKFKEDFPDFVGEPRGKDILKMRLYEQQHGKCLYSGHDIDINRLNEKGYVEIDHALPFSRTWDDSQNNKVLVLGSENQNKRNQTPDEYLDGANNSQRWLEFQARVQTCHFSYGKKQRIQLAKLDDETEKGFLERNLNDTRYIARFMCQFVQENLYLTGKGKRLVFASNGGMTATLRNLWGLRKVREDNDRHHALDAIVVACSTASMQQKITKAFQRHESIEYVDTETGEVKFRIPQPWDFFRQEVMIRVFSDQPCEDLVEKLSARPEALHDNVTPLFVSRAPNRKMSGQGHLETIKSAKRLSEENSMVKKPLTTLKLKDIPEIVGYPSREPQLYAALKTRLETHDDDPIKAFAKPFYKPNKNGELGALVRSVRVKGVQNTGVMVHDGKGIADNATMVRVDVYTKAGKNYLVPVYVWQVAQGILPNRAVTSGKSEADWDLIDESFEFKFSLSRGDLVEMISNKGRIFGYYNGLDRANGSIGIREHDLEKSKGKDGVHRVGVKTATAFNKYHVDPLGKEIHRCSSEPRPTLKIKSKK

SEQ ID NO: 413 - protein, 1327 aa, Solobacterium moorei
  source 1..1327: note = F0204
MEGQMKNNGNNLQQGNYYLGLDVGTSSVGWAVTDTDYNVLKFRGKSMWGARLFDEASTAEERRTHRGNRRRLARRKYRLLLLEQLFEKEIRKIDDNFFVRLHESNLWADDKSKPSKFLLFNDTNFTDKDYLKKYPTIYHLRSDLIHNSTEHDIRLVFLALHHLIKYRGHFIYDNSANGDVKTLDEAVSDFEEYLNENDIEFNIENKKEFINVLSDKHLTKKEKKISLKKLYGDITDSENINISVLIEMLSGSSISLSNLFKDIEFDGKQNLSLDSDIEETLNDVVDILGDNIDLLIHAKEVYDIAVLTSSLGKHKYLCDAKVELFEKNKKDLMILKKYIKKNHPEDYKKIFSSPTEKKNYAAYSQTNSKNVCSQEEFCLFIKPYIRDMVKSENEDEVRIAKEVEDKSFLTKLKGTNNSVVPYQIHERELNQILKNIVAYLPFMNDEQEDISVVDKIKLIFKFKIPYYVGPLNTKSTRSWVYRSDEKIYPWNFSNVIDLDKTAHEFMNRLIGRCTYTNDPVLPMDSLLYSKYNVLNEINPIKVNGKAIPVEVKQAIYTDLFENSKKKVTRKSIYIYLLKNGYIEKEDIVSGIDIEIKSKLKSHHDFTQIVQENKCTPEEIERIIKGILVYSDDKSMLRRWLKNNIKGLSENDVKYLAKLNYKEWGRLSKTLLTDIYTINPEDGEACSILDIMWNTNATLMEILSNEKYQFKQNIENYKAENYDEKQNLHEELDDMYISPAARRSIWQALRIVDEIVDIKKSAPKKIFIEMAREKKSAMKKKRTESRKDTLLELYKSCKSQADGFYDEELFEKLSNESNSRLRRDQLYLYYTQMGRSMYTGKRIDFDKLINDKNTYDIDHIYPRSKIKDDSITNRVLVEKDINGEKTDIYPISEDIRQKMQPFWKILKEKGLINEEKYKRLTRNYELTDEELSSFVARQLVETQQSTKALATLLKKEYPSAKIVYSKAGNVSEFRNRKDKELPKFREINDLHHAKDAYLNIVVGNVYDTKFTEKFFNNIRNENYSLKRVFDFSVPGAWDAKGSTFNTIKKYMAKNNPIIAFAPYEVKGELFDQQIVPKGKGQFPIKQGKDIEKYGGYNKLSSAFLFAVEYKGKKARERSLETVYIKDVELYLQDPIKYCESVLGLKEPQIIKPKILMGSLFSINNKKLVVTGRSGKQYVCHHIYQLSINDEDSQYLKNIAKYLQEEPDGNIERQNILNITSVNNIKLFDVLCTKFNSNTYEIILNSLKNDVNEGREKFSELDILEQCNILLQLLKAFKCNRESSNLEKLNNKKQAGVIVIPHLFTKCSVFKVIHQSITGLFEKEMDLLK

SEQ ID NO: 414 - protein, 1179 aa, Sphaerochaeta globosa
MSKKVSRRYEEQAQEICQRLGSRPYSIGLDLGVGSIGVAVAAYDPIKKQPSDLVFVSSRIFIPSTGAAERRQKRGQRNSLRHRANRLKFLWKLLAERNLMLSYSEQDVPDPARLRFEDAVVRANPYELRLKGLNEQLTLSELGYALYHIANHRGSSSVRTFLDEEKSSDDKKLEEQQAMTEQLAKEKGISTFIEVLTAFNTNGLIGYRNSESVKSKGVPVPTRDIISNEIDVLLQTQKQFYQEILSDEYCDRIVSAILFENEKIVPEAGCCPYFPDEKKLPRCHFLNEERRLWEAINNARIKMPMQEGAAKRYQSASFSDEQRHILFHIARSGTDITPKLVQKEFPALKTSIIVLQGKEKAIQKIAGFRFRRLEEKSFWKRLSEEQKDDFFSAWTNTPDDKRLSKYLMKHLLLTENEVVDALKTVSLIGDYGPIGKTATQLLMKHLEDGLTYTEALERGMETGEFQELSVWEQQSLLPYYGQILTGSTQALMGKYWHSAFKEKRDSEGFFKPNTNSDEEKYGRIANPVVHQTLNELRKLMNELITILGAKPQEITVELARELKVGAEKREDIIKQQTKQEKEAVLAYSKYCEPNNLDKRYIERFRLLEDQAFVCPYCLEHISVADIAAGRADVDHIFPRDDTADNSYGNKVVAHRQCNDIKGKRTPYAAFSNTSAWGPIMHYLDETPGMWRKRRKFETNEEEYAKYLQSKGFVSRFESDNSYIAKAAKEYLRCLFNPNNVTAVGSLKGMETSILRKAWNLQGIDDLLGSRHWSKDADTSPTMRKNRDDNRHHGLDAIVALYCSRSLVQMINTMSEQGKRAVEIEAMIPIPGYASEPNLSFEAQRELFRKKILEFMDLHAFVSMKTDNDANGALLKDTVYSILGADTQGEDLVFVVKKKIKDIGVKIGDYEEVASAIRGRITDKQPKWYPMEMKDKIEQLQSKNEAALQKYKESLVQAAAVLEESNRKLIESGKKPIQLSEKTISKKALELVGGYYYLISNNKRTKTFVVKEPSNEVKGFAFDTGSNLCLDFYHDAQGKLCGEIIRKIQAMNPSYKPAYMKQGYSLYVRLYQGDVCELRASDLTEAESNLAKTTHVRLPNAKPGRTFVIIITFTEMGSGYQIYFSNLAKSKKGQDTSFTLTTIKNYDVRKVQLSSAGLVRYVSPLLVDKIEKDEVALCGE

SEQ ID NO: 415 - protein, 1426 aa, Sphingobacterium spiritivorum
  source 1..1426: note = ATCC 33861
MKHILGLDLGTNSIGWALIKQDFENKQGEILGMGSRIIPMSQDILGDFGKGNSVSQTAERTKYRSVRRLRERFLLRRERLHRILNVLGFLPEHYASQIDFTKRFGKFKEETEPKLVYSNEGFIFKKSFEEMLSDFKTHQPQLLEDNKKIPYDWTIYYLRKKALSRKIEKEELAWILLNFNQKRGYYQLRGEEEEENPNKLIEFYSLKIVDVLADEPQKGKSDIWYSLILENGWIYRRSSKTPLFDWKEKTRDFIVTIDLNDDGSVKTDKEGNEKRSFRAPGENDWTLVKKKTEQEIDSSRKTVGTYIYETLLKNPKQKIKGKLVRTIERKFYKTELKQILEKQKEFHPELRQDDLYSDCVRELYKNNEAHQLTLSKKDFVHLFMEDIIFYQRPLGSQKSSISNCTLEFRKYKDENGTEHTQYLKAIPKSNPYYQEFRIWQWMYNLNIYKKEDDTNVTKDFLNTKADFESLFEFLNNRKEVDQKALLKHFKLNDKTHRWNYVEDKKYPCNETKTMILSRLDKVENISDDFLTREMEQKIWHIIYSVNDKVEYEKALKSFAGKNNLEDNSFFEAFKKFPPFKSEYGAFSEKAIKKLLPLMRMGKFWNYNNISEQSKSRIQKIITGEYDENIKDKVREKAIHLTTETDFQGLQLWLVQYIVYGRHSEAAMLGKWNSADDLEEFLKEFKQHSLRNPIVEQVITETLRVVKDIWQKYGNGAKDFFREIHIELGREMKLPAEERERLTRQISENENTNFRIKALLAEMMDDNSVENVRPFSPMQQEILKIYEEGVLNSDIEIEDDILKISKTAQPSSSDLKRYKLWLEQKYKSPYTGQIIPLNKLFTPEYEIEHIIPQSRYFDDSFTNKIICESAVNKLKDNYIGLEFIKKLGGSIVECGNGKSVAILKHDAYEDFIKKHYANNRSKRNKLLLEDIPEKMIERQMNDTRYISKYISGVLSNIVRVEDGTDEGVNSKNIVPGNGKITTQLKQDWGLNDVWNDLILPRFERMNHLTNSTDFTAWNENHQKFLPTVPVEFSKGFSKKRIDHRHHALDALVIACATKDHVNLLNNQSAKSDTKRYDLKKKLMKFEKVAYNHPQTGERIEREAPKQFLKPWETFTIDAKNHLETIIVSFKQNLRVINKATNYYEKYVEKEGTKVKERVEQKGTNWAIRKPMHKETVSGKIDLPRIKVPKGKILTATRKSLDTSFNLKTIGSITDTGIQKILKNYLQYKDNNPELAFSPEGIEDMNKNIEKFNNGKAHQSISKVRVFELGSKFPLGQSGNKKEKYVEAAKGTNLFFAIYQDKNGKRSYETIPLNEVIERQKQGLSVVDLKGVDDFYLSPNDLVYVPSEDELENISMIDFNKMSSERIYKVVSFTGNQIFFVRQDIATSVVNKAEFSTLNKMERAIDGTMIKETCVKLQIDRLGNISKI

SEQ ID NO: 416 - protein, 1110 aa, Sphingobium sp.
  source 1..1110: note = AP49
MAEGKKRIWRLGADLGANSLGWAAIELSAPVNGKPIAILAAGSRIFSDGRDPKSGASLAVDRRDARAMRRRRDRFKQRQKALIKYLIADGLFPADEAARNAMAAIDPYAVRARALDEALSLPELGRALFHLNQRRGFKSNRKADRKADDDAGKIAIGIDRTRDAIAEDEADAGAEPGSWTFGKWLHERRLKGQSVRTRLRPESGEDAKGDGYDFYPDRALMEEEFDAIWAAQAPHHPDVLTNDVHDRLHEIIFYQRPLKAPQVGMCSLIPGDRRLPKAHPLFQRRRLLEELNALMIVRPGEVAQRLTREERDILLLKLKDKNKVSFATLRKALKLDPDARFNKESEDRTDLKGDEVAAVMGSKTRFGNLWVHLSIEAQWDVLARLDAVESDAEDAAFCAWLVETYALTPEQARAVANAPLPPGYGRFGETATRKLIEALRDGKKDDRVLVYSEAVTEAGLGHHSDRRTGEVFEDAKGRPQLPYYGVALERHIMPGTGDPSDPEEMRVGRLTNPTVHIGLNQLRRILNVLIRAYGPPAEIAIELARELKLTDEDKKRINRENNDNRIAAERRSEKLLAIGQADSGANRALLKLWEELNPANVLDRRCIYSGRQISIDMLFSAAVEVDHILPFAATLDDSNGNKIVCLREANREKRKRSPHDAWGHSARWDEIAARAAQLPRNKRWRFEPDAMDKFRDEGGFQARHLVDTQYLARLSREYLATLYPEKGEGSGHIWVSPGRLTEMVRRKLGLNDLLPDHNFGGGADQAKNRLDHRHHAIDAVVVAIVDRGMLNAIARASGQEGAEGRERIIIPEPWDGFRDALRETVNRITVSHRTDHGTASKAGLPKGKDATAGRLHNDTAYGFTGDTDAKGNSIVVRRVPLSSFKKLADLDRIRDADLKAALYQHLNGLEGKAFEKALAEFHKLEWHNFGGVRRVRVTEPLTVIPIKDRNGRIYKGYKGDSNYRYDVWELPDGKWVTNWKNEAGEAMSSVISMFDAHQSSEPPRPHPAARKILSLHQNDLLAIEREGEDRKLMRVVKFGQSGQITLAEHQQAGDLKKRDAVSNDDDPFKYFAPTSGGLKKVKARQVRIDEIGRVLDPGFPARTARRKTRG

SEQ ID NO: 417 - protein, 1090 aa, Sphingomonas sp.
  source 1..1090: note = S17
MDWRLGLDLGANSLGWAALRLDRAGDPIGILAMGSRIFSDGRDPKSGASLAVDRRAARAMRRRRDRFKQRQAALLKYLIRDGLFPADQADRQRLADEDPYALRARALDEELSLFEIGRALFHLNQRRGFQSNRKADRGQDDEAGKIAVGVDRLNQQMEEQGARTLGEFLHQRRRAATDANHIPSVRTRLRPETGEGAKGDGYDFYPSRALIAEEFEEIWAAQAPHYPDTLTQQVHDRLYEIIFHQRPLRAPQVGQCTLVAGETRLPKAHPLFQKRRLLEEINALMIVRPGEIAQRLTPEERDTLYLKLKDKRTVSFATLRKTLKLDSAARFNKESENRTELKGDEVAAELGAKTRLGTRWQHLSGDQQWEVVHRLMALESQADEAAFRDWISQTYDLLPEQAAAVLGARLPQGHGRFGPTATTTLIDSLLHDRTEDGRVVVYSEAVQRSGLGHHSDLRHDRDDEDVTELPYYGVALERHIMPGTAEPTDPEEMRIGRLTNPTVHIGLNQLRHVVNRLIRAYGPPKEIAIELARELKLSEDEKKKRNSENRDNRLAAEGRSKKLEEIRQRDTGANRALLKLWEELNPGNVLDRRCIYTGEQISIDMLFSDRVEVDHILPFAQTLDDSNGNKLLCLREANREKRRRSPYEAWGHTDRWPDIAERASRLPKPKRWRFEPDAMQRFATEDGFLARHLVDTQYLGRLAREYLSWLYPGRGEGSGHVWVSPGRLTEMVRRKLGLNDLLPDHNFGGGADQPKNRLDHRHHAIDALVVAIVDRGMLQAIARASGQDGSEGRERIHIPAPWDGFRDDLRVAVNGIIVSHRPDHGTVAKAGLARGRDQTAGRLHNDTAYGLTGETDAKGNSIVVRRIPLSAIKKPADIARVRDPLLRNALAEFTKGLDGKAFEARIGRFHELGPLLYRGIRRVRVVETLTVIPIRDAEGRAYKGYKGDSNYRYDVWEMPDGKWRCQVVSMFDAHQSTEQARPHPAARKILSLQRNDILAIERTEGDRELVRVVKFSEKQFAVAPPHEGGSLKTRDGNADDPFRYLYPSPNTLKGWRARQVRIDELGRVLDPGFPARKSVRRTRPRAAPVD

SEQ ID NO: 418 - protein, 1084 aa, Sporolactobacillus vineae
  source 1..1084: note = DSM 21990 = SL153
MKYSIGLDIGISSVGWSVINLDRERIELMGARLFDAAENPKNGSSLAAPRRDARSARRRLRRRRYRVGRVRHFIIDRGLVTRGQADQLFDWKDGDLDIWLVRVNALERLLTDREFARVLIHIAKNRGYRSNRKSEAKSGENGQVLSAIKANKELMEEKGYQTVAEMLVNEPETFAGRKRNRGGEYTHVIARSELEHEIRLIFTKQRAFGNRFATEENENTYVKIWAAQRPVATKDDILKKIGDCTFEKGEKRAPKASYAFQYFRALDKLNRLRILSVREPSRNLTDDERNLIVPALFNHDKQKYSDLRKILQLRDDQKFNELFYDPGKSLKENENKTFLSLAEQYKIRKVIRDVQGKDGLLQYRPLDIDTIAYALTVFKDDQDTRDYLSNTFVNGNGKQVLNLANRAFDAELIDGLLSLSFAKFGHLSLKALHKLIPHMEQGLSYYDACKKVGYHDNEQVGKSKQHLLPVIPADEIRNPVVVRSLSQTRKVINAIIKRYGSPTFMYIELAREMGRPYNERRDLEKQYNKNRTVNDSAIEQIHELYPEIGAPRGHDILKYKLWQQQDCKCAYSLEKIPAEKIFEPGYAEVDHIIPYSRSFDDSNSNKVLVLSRMNQEKKNRTPYEWFGGDEHRWNKFESYVNALKVNRKKKSLLTKKNMDTEEEDTFKSRHLNDTRYITRFIKSFVEDNLLFREIEGAKQHVFTVNGAYTSLMRKRWGFNKNREESDLHHSVDAVIIAVSQPFRNEVSRYFKHREISLPQLLKRTWDYFPEPWEGFVKELRARTLQDPEKLKLALESLDLDSYDPEFIDEVKPIFISRMPKRSIKGQIHDETLRRNRGKTKDGFVKIVTRTRLENIKFDKNGDFPMYGRESDPKTYQAIKQRYLENNKDKKKAFIEPLYKPAKNPNNASLIRSVKIEDKANQIVPLRDEAVAYNASIVRTEVYRNKETGKFYLAPVYVSDVFAGREPRRFIRANVPYEQWVNITDKFTFLFNLYPNDVIYIKMKKVKTTKSNINKTISWQESYFYFKGTDIHTGAITIIDHMNSFTDRVGTQGLQLFEKYQVDPLGNLSRVHGETQYGVPALSHS

SEQ ID NO: 419 - protein, 1053 aa, Staphylococcus aureus; identical to SEQ ID NO: 24
  source 1..1053: note = subsp. aureus

SEQ ID NO: 420 - protein, 1054 aa, Staphylococcus lugdunensis
  source 1..1054: note = M23590
MNQKFILGLDIGITSVGYGLIDYETKNIIDAGVRLFPEANVENNEGRRSKRGSRRLKRRRIHRLERVKKLLEDYNLLDQSQIPQSTNPYAIRVKGLSEALSKDELVIALLHIAKRRGIHKIDVIDSNDDVGNELSTKEQLNKNSKLLKDKFVCQIQLERMNEGQVRGEKNRFKTADIIKEIIQLLNVQKNFHQLDENFINKYIELVEMRREYFEGPGKGSPYGWEGDPKAWYETLMGHCTYFPDELRSVKYAYSADLFNALNDLNNLVIQRDGLSKLEYHEKYHIIENVFKQKKKPTLKQIANEINVNPEDIKGYRITKSGKPQFTEFKLYHDLKSVLFDQSILENEDVLDQIAEILTIYQDKDSIKSKLTELDILLNEEDKENIAQLTGYTGTHRLSLKCIRLVLEEQWYSSRNQMEIFTHLNIKPKKINLTAANKIPKAMIDEFILSPVVKRTFGQAINLINKIIEKYGVPEDIIIELARENNSKDKQKFINEMQKKNENTRKRINEIIGKYGNQNAKRLVEKIRLHDEQEGKCLYSLESIPLEDLLNNPNHYEVDHIIPRSVSFDNSYHNKVLVKQSENSKKSNLTPYQYFNSGKSKLSYNQFKQHILNLSKSQDRISKKKKEYLLEERDINKFEVQKEFINRNLVDTRYATRELTNYLKAYFSANNMNVKVKTINGSFTDYLRKVWKFKKERNHGYKHHAEDALIIANADFLFKENKKLKAVNSVLEKPEIESKQLDIQVDSEDNYSEMFIIPKQVQDIKDFRNFKYSHRVDKKPNRQLINDTLYSTRKKDNSTYIVQTIKDIYAKDNTTLKKQFDKSPEKFLMYQHDPRTFEKLEVIMKQYANEKNPLAKYHEETGEYLTKYSKKNNGPIVKSLKYIGNKLGSHLDVTHQFKSSTKKLVKLSIKPYRFDVYLTDKGYKFITISYLDVLKKDNYYYIPEQKYDKLKLGKAIDKNAKFIASFYKNDLIKLDGEIYKIIGVNSDTRNMIELDLPDIRYKEYCELNNIKGEPRIKKTIGKKVNSIEKLTTDVLGNVFTNTQYTKPQLLFKRGN

SEQ ID NO: 421 - protein, 1334 aa, Staphylococcus pseudintermedius
MGRKPYILSLDIGTGSVGYACMDKGFNVLKYHDKDALGVYLFDGALTAQERRQFRTSRRRKNRRIKRLGLLQELLAPLVQNPNFYQFQRQFAWKNDNMDFKNKSLSEVLSFLGYESKKYPTIYHLQEALLLKDEKFDPELIYMALYHLVKYRGHFLFDHLKIENLTNNDNMHDFVELIETYENLNNIKLNLDYEKTKVIYEILKDNEMTKNDRAKRVKNMEKKLEQFSIMLLGLKFNEGKLFNHADNAEELKGANQSHTFADNYEENLTPFLTVEQSEFIERANKIYLSLTLQDILKGKKSMAMSKVAAYDKFRNELKQVKDIVYKADSTRTQFKKIFVSSKKSLKQYDATPNDQTFSSLCLFDQYLIRPKKQYSLLIKELKKIIPQDSELYFEAENDTLLKVLNTTDNASIPMQINLYEAETILRNQQKYHAEITDEMIEKVLSLIQFRIPYYVGPLVNDHTASKFGWMERKSNESIKPWNFDEVVDRSKSATQFIRRMTNKCSYLINEDVLPKNSLLYQEMEVLNELNATQIRLQTDPKNRKYRMMPQIKLFAVEHIFKKYKTVSHSKFLEIMLNSNHRENFMNHGEKLSIFGTQDDKKFASKLSSYQDMTKIFGDIEGKRAQIEEIIQWITIFEDKKILVQKLKECYPELTSKQINQLKKLNYSGWGRLSEKLLTHAYQGHSIIELLRHSDENFMEILTNDVYGFQNFIKEENQVQSNKIQHQDIANLTTSPALKKGIWSTIKLVRELTSIFGEPEKIIMEFATEDQQKGKKQKSRKQLWDDNIKKNKLKSVDEYKYIIDVANKLNNEQLQQEKLWLYLSQNGKCMYSGQSIDLDALLSPNATKHYEVDHIFPRSFIKDDSIDNKVLVIKKMNQTKGDQVPLQFIQQPYERIAYWKSLNKAGLISDSKLHKLMKPEFTAMDKEGFIQRQLVETRQISVHVRDFLKEEYPNTKVIPMKAKMVSEFRKKFDIPKIRQMNDAHHAIDAYLNGVVYHGAQLAYPNVDLFDFNFKWEKVREKWKALGEFNTKQKSRELFFFKKLEKMEVSQGERLISKIKLDMNHFKINYSRKLANIPQQFYNQTAVSPKTAELKYESNKSNEVVYKGLTPYQTYVVAIKSVNKKGKEKMEYQMIDHYVFDFYKFQNGNEKELALYLAQRENKDEVLDAQIVYSLNKGDLLYINNHPCYFVSRKEVINAKQFELTVEQQLSLYNVMNNKETNVEKLLIEYDFIAEKVINEYHHYLNSKLKEKRVRTFFSESNQTHEDFIKALDELFKVVTASATRSDKIGSRKNSMTHRAFLGKGKDVKIAYTSISGLKTTKPKSLFKLAESRNEL

SEQ ID NO: 422 - protein, 1334 aa, Staphylococcus pseudintermedius; identical to SEQ ID NO: 421
  source 1..1334: note = ED99

SEQ ID NO: 423 - protein, 1112 aa, Staphylococcus simulans
  source 1..1112: note = ACS-120-V-Sch1
MLVGLKFKQSILFENMENAEDIKESATGSDAISLSDDYYENLSEFLTDEQLNFIESANTFFMGIMLDRILKGATSISAAKVRDYKIFKSQLKLIKDIVYQNKYDKYHEFFVTSKEDMRAYQENPDAKNFGKLSKFDQYLIHSKDQYAKLMKDLKGLVPKEYTEVLNLIDEQKFLVVQNTTDNASIPYQNNVFEAENILRNQQKYYPEITEEMIGKVINLISFRIPYYVGPLTNKNGQSDFAWMIRKSDEQTLPWNFDKVIDKSKSAEKFIRRMTSKCTYLLEEDVLPKHSLLYQEMEVLNELNNVQLRGENEPKHRIHRLDPKVKQFIYHNLFQKKKNVTHKDLITLLQNSEHRNTLNKTSGQKLKVFGTQNDSKFASKLSTYNDMKAILGSVENKRQMIEELVLWITIFEDKAILKQKIGEKYPNITEKQLNQIVKLNYSGWGRLSEKLLTKEVNGRSLIDLMYSTENNFMEIITDKTLGFDCFIKNSNKVKNAKISYKDVAELRTSPALKKGIWNAIKMVREISNLFGAPEKIIIEFATEDQAKGKRQKSRSELWDDLVKKNNLKRNKEFEGLFEELKAYPDLDFSNPKLWLYIHQNGKCMYTKKPIDLERLMSDTNNQLYEIDHILPRTFVKDDSINNKVLVIQSANQKKSGDKMPLEIFDNHVLVPFWKMLYENDLISSSKLSKLMKKEFNDLDKEGFIQRQLVETRQIISHVSDFLTEEYPSTTVVPMKANVVSELRRKFDIPKIRQLNDWHHAVDAYLNGFVYQAARVFYPKVNLFEFNFKWEKVREKWRQLGEFTENNKKREFFLFKRMENYVNEYGEGMISKLIFDLDNFKFNYSRKVESTESAFYKQSAFSPKNTTAQYDSDKNKTAIYKEMKNKRGIVVSYTYVKKDQELIGYGVFNETVFEYVNNADVDMNTRALKIVRKAFPKLDIKKAQYLFSINKGDALLVNGHPFLFVSAYERINGKQLEFDIAMQRKIKQALSPYNNMTEQEKVEFYNQFAEKVIEEFRNSIGLQSRDRKVNLIKNLFNNTEKSNDSMTQSILEVLKMTKVSAERSKELKIRWNGQTPNTFIDTKNNAEIQYKSITGLKTTKPKSIFKLAESKNEL

SEQ ID NO: 424 - protein, 1370 aa, Streptococcus agalactiae
  source 1..1370: note = 2603V/R
MNKPYSIGLDIGTNSVGWSIITDDYKVPAKKMRVLGNTDKEYIKKNLIGALLFDGGNTAADRRLKRTARRRYTRRRNRILYLQEIFAEEMSKVDDSFFHRLEDSFLVEEDKRGSKYPIFATLQEEKDYHEKFSTIYHLRKELADKKEKADLRLIYIALAHIIKFRGHFLIEDDSFDVRNTDISKQYQDFLEIFNTTFENNDLLSQNVDVEAILTDKISKSAKKDRILAQYPNQKSTGIFAEFLKLIVGNQADFKKYFNLEDKTPLQFAKDSYDEDLENLLGQIGDEFADLFSAAKKLYDSVLLSGILTVIDLSTKAPLSASMIQRYDEHREDLKQLKQFVKASLPEKYQEIFADSSKDGYAGYIEGKTNQEAFYKYLSKLLTKQEDSENFLEKIKNEDFLRKQRTFDNGSIPHQVHLTELKAIIRRQSEYYPFLKENQDRIEKILTFRIPYYIGPLAREKSDFAWMTRKTDDSIRPWNFEDLVDKEKSAEAFIHRMTNNDFYLPEEKVLPKHSLIYEKFTVYNELTKVRYKNEQGETYFFDSNIKQEIFDGVFKEHRKVSKKKLLDFLAKEYEEFRIVDVIGLDKENKAFNASLGTYHDLEKILDKDFLDNPDNESILEDIVQTLTLFEDREMIKKRLENYKDLFTESQLKKLYRRHYTGWGRLSAKLINGIRDKESQKTILDYLIDDGRSNRNFMQLINDDGLSFKSIISKAQAGSHSDNLKEVVGELAGSPAIKKGILQSLKIVDELVKVMGYEPEQIVVEMARENQTTNQGRRNSRQRYKLLDDGVKNLASDLNGNILKEYPTDNQALQNERLFLYYLQNGRDMYTGEALDIDNLSQYDIDHIIPQAFIKDDSIDNRVLVSSAKNRGKSDDVPSLEIVKDCKVFWKKLLDAKLMSQRKYDNLTKAERGGLTSDDKARFIQRQLVETRQITKHVARILDERFNNELDSKGRRIRKVKIVTLKSNLVSNFRKEFGFYKIREVNNYHHAHDAYLNAVVAKAILTKYPQLEPEFVYGDYPKYNSYKTRKSATEKLFFYSNIMNFFKTKVTLADGTVVVKDDIEVNNDTGEIVWDKKKHFATVRKVLSYPQNNIVKKTEIQTGGFSKESILAHGNSDKLIPRKTKDIYLDPKKYGGFDSPIVAYSVLVVADIKKGKAQKLKTVTELLGITIMERSRFEKNPSAFLESKGYLNIRADKLIILPKYSLFELENGRRRLLASAGELQKGNELALPTQFMKFLYLASRYNESKGKPEEIEKKQEFVNQHVSYFDDILQLINDFSKRVILADANLEKINKLYQDNKENISVDELANNIINLFTFTSLGAPAAFKFFDKIVDRKRYTSTKEVLNSTLIHQSITGLYETRIDLGKLGED

SEQ ID NO: 425 - protein, 1377 aa, Streptococcus agalactiae
  source 1..1377: note = 515
MNKPYSIGLDIGTNSVGWSIITDDYKVPAKKMRVLGNTDKEYIKKNLIGALLFDGGNTAADRRLKRTARRRYTRRRNRILYLQEIFAEEMSKVDDSFFHRLEDSFLVEEDKRGSKYPIFATMQEEKYYHEKFPTIYHLRKELADKKEKADLRLVYLALAHIIKFRGHFLIEDDRFDVRNTDIQKQYQAFLEIFDTTFENNHLLSQNVDVEAILTDKISKSAKKDRILAQYPNQKSTGIFAEFLKLIVGNQADFKKHFNLEDKTPLQFAKDSYDEDLENLLGQIGDEFADLFSVAKKLYDSVLLSGILTVTDLSTKAPLSASMIQRYDEHHEDLKHLKQFVKASLPENYREVFADSSKDGYAGYIEGKTNQEAFYKYLLKLLTKQEGSEYFLEKIKNEDFLRKQRTFDNGSIPHQVHLTELRAIIRRQSEYYPFLKENQDRIEKILTFRIPYYVGPLAREKSDFAWMTRKTDDSIRPWNFEDLVDKEKSAEAFIHRMTNNDLYLPEEKVLPKHSLIYEKFTVYNELTKVRFLAEGFKDFQFLNRKQKETIFNSLFKEKRKVTEKDIISFLNKVDGYEGIAIKGIEKQFNASLSTYHDLKKILGKDFLDNTDNELILEDIVQTLTLFEDREMIKKCLDIYKDFFTESQLKKLYRRHYTGWGRLSAKLINGIRNKENQKTILDYLIDDGSANRNFMQLINDDDLSFKPIIDKARTGSHSDNLKEVVGELAGSPAIKKGILQSLKIVDELVKVMGYEPEQIVVEMARENQTTAKGLSRSRQRLTTLRESLANLKSNILEEKKPKYVKDQVENHHLSDDRLFLYYLQNGRDMYTKKALDIDNLSQYDIDHIIPQAFIKDDSIDNRVLVSSAKNRGKSDDVPSIEIVKARKMFWKNLLDAKLMSQRKYDNLTKAERGGLTSDDKARFIQRQLVETRQITKHVARILDERFNNEVDNGKKICKVKIVTLKSNLVSNFRKEFGFYKIREVNDYHHAHDAYLNAVVAKAILTKYPQLEPEFVYGMYRQKKLSKIVHEDKEEKYSEATRKMFFYSNLMNMFKRVVRLADGSIVVRPVIETGRYMGKTAWDKKKHFATVRKVLSYPQNNIVKKTEIQTGGFSKESILAHGNSDKLIPRKTKDIYLDPKKYGGFDSPIVAYSVLVVADIKKGKAQKLKTVTELLGITIMERSRFEKNPSAFLESKGYLNIRDDKLMILPKYSLFELENGRRRLLASAGELQKGNELALPTQFMKFLYLASRYNESKGKPEEIEKKQEFVNQHVSYFDDILQLINDFSKRVILADANLEKINKLYQDNKENIPVDELANNIINLFTFTSLGAPAAFKFFDKIVDRKRYTSTKEVLNSTLIHQSITGLYETRIDLGKLGED

SEQ ID NO: 426 - protein, 1370 aa, Streptococcus agalactiae; identical to SEQ ID NO: 424

SEQ ID NO: 427 - protein, 1378 aa, Streptococcus agalactiae
  source 1..1378: note = ATCC 13813
MNKPYSIGLDIGTNSVGWSIITDDYKVPAKKMRVLGNTDKEYIKKNLIGALLFDGGNTAADRRLKRTARRRYTRRRNRILYLQEIFAEEMSKVDDSFFHRLEDSFLVEEDKRGSKYPIFATMQEEKYYHEKFPTIYHLRKELADKKEKADLRLIYLALAHIIKFRGHFLIEDDRFDVRNTDIQKQYQAFLEIFDTTFENNDLLSQNVDVEAILTDKISKSAKKDRILARYPNQKSTGIFAEFLKLIVGNQADFKKHFNLEDKTPLQFAKDSYDEDLENLLGQIGDEFADLFSAAKKLYDSVLLSGILTVIDLSTKAPLSASMIQRYDEHHEDLKHLKQFVKASLPENYREVFADSSKDGYAGYIEGKTSQEAFYKYLLKLLTKQEGSEYLLEKIKNEDFLRKQRTFDNGSIPHQVHLTELRAIIRRQSEYYPFLKENLDRIEKILTFRIPYYVGPLAREKSDFAWMTRKTDDSIRPWNFEDLVDKEKSAEAFIHRMTNNDLYLPEEKVLPKHSLIYEKFTVYNELTKVRFLAEGFKDFQFLNRKQKETIFNSLFKEKRKVTEKDIISFLNKVDGYEGIAIKGIEKQFNASLSTYHDLKKILGKDFLDNTDNELILEDIIQTLTLFEDREMIKKRLDIYKDFFTESQLKKLYRRHYTGWGRLSAKLINGIRNKENQKTILDYLIDDGSANRNFMQLIKDAGLSFKPIIDKARTGSHSDNLKEVVGELAGSPAIKKGILQSLKIVDELVKVMGYEPEQIVVEMARENQTTAKGLSRSRQRLTTLRESLGNLKSNILEEKKPKYVKDQVENHHLSDDRLFLYYLQNGKDMYTDDELDIDNLSQYDIDHIIPQAFIKDDSIDNRVLVSSAKNRGKSDDVPSIEIVKARKMFWKNLLDAKLMSQRKYDNLTKAERGGLTSDDKARFIQRQLVETRQITKHVARILDERFNNELDSKGRRIRKVKIVTLKSNLVSNFRKEFGFYKIREVNNYHHAHDAYLNAVVAKAILTKYPQLEPEFVYGLYRRKKLSKIVREDKEEKYSEATRKMFFYSNLMNMFKRVVRLADGSIVVRPVIETGRYMGKTAWDKKKHFATVRKVLSYPQNNIVKKTEIQTGGFSKESILAHGNSDKLIPRKTKDIYLDPKKYGGFDSPIVAYSVLVVADIKKGKAQKLKTVTELLGITIMERSRFEKNTSAFLESKGYLNIRDDKLMILPKYSLFELENGRRRLLASAGELQKGNELALPTQFMKFLYLASRYNESKGKPEEIEKKQEFVNQHVSYFDDILQLINDFSNRVILADANLEKINKLYQDNKENIPVDELANNIINLFTFTSLGAPAAFKFFDKIVDRKRYTSTKEVLNSTLIHQSITGLYETRIDLGKLGEG

SEQ ID NO: 428 - protein, 1370 aa, Streptococcus agalactiae
  source 1..1370: note = CJB111
MNKPYSIGLDIGTNSVGWSIITDDYKVPAKKMRVLGNTDKEYIKKNLIGALLFDGGNTAADRRLKRTARRRYTRRRNRILYLQEIFAEEMSKVDDSFFHRLEDSFLVEEDKRGSKYXIFATLQEEKDYHEKFSTIYHLRKELADKKEKADLRLIYIALAHIIKFRGHFLIEDDSFDVRNTDISKQYQDFLEIFNTTFENNDLLSQNVDVEAILTDKISKSAKKDRILAQYPNQKSTGIFAEFLKLIVGNQADFKKYFNLEDKTPLQFAKDSYDEDLENLLGQIGDEFADLFSAAKKLYDSVLLSGILTVIDLSTKAPLSASMIQRYDEHREDLKQLKQFVKASLPEKYQEIFADSSKDGYAGYIEGKTNQEAFYKYLSKLLTKQEDSENFLEKIKNEDFLRKQRTFDNGSIPHQVHLTELKAIIRRQSEYYPFLKENQDRIEKILTFRIPYYIGPLAREKSDFAWMTRKTDDSIRPWNFEDLVDKEKSAEAFIHRMTNNDFYLPEEKVLPKHSLIYEKFTVYNELTKVRYKNEQGETYFFDSNIKQEIFDGVFKEHRKVSKKKLLDFLAKEYEEFRIVDVIGLDKENKAFNASLGTYHDLEKILDKDFLDNPDNESILEDIVQTLTLFEDREMIKKRLENYKDLFTESQLKKLYRRHYTGWGRLSAKLINGIRDKESQKTILDYLIDDGRSNRNFMQLINDDGLSFKSIISKAQAGSHSDNLKEVVGELAGSPAIKKGILQSLKIVDELVKVMGYEPEQIVVEMARENQTTNQGRRNSRQRYKLLDDGVKNLASDLNGNILKEYPTDNQALQNERLFLYYLQNGRDMYTGEALDIDNLSQYDIDHIIPQAFIKDDSIDNRVLVSSAKNRGKSDDVPSLEIVKDCKVFWKKLLDAKLMSQRKYDNLTKAERGGLTSDDKARFIQRQLVETRQITKHVARILDERFNNELDSKGRRIRKVKIVTLKSNLVSNFRKEFGFYKIREVNNYHHAHDAYLNAVVAKAILTKYPQLEPEFVYGDYPKYNSYKTRKSATEKLFFYSNIMNFFKTKVTLADGTVVVKDDIEVNNDTGEIVWDKKKHFATVRKVLSYPQNNIVKKTEIQTGGFSKESILAHGNSDKLIPRKTKDIYLDPKKYGGFDSPIVAYSVLVVADIKKGKAQKLKTVTELLGITIMERSRFEKNPSAFLESKGYLNIRADKLIILPKYSLFELENGRRRLLASAGELQKGNELALPTQFMKFLYLASRYNESKGKPEEIEKKQEFVNQHVSYFDDILQLINDFSKRVILADANLEKINKLYQDNKENISVDELANNIINLFTFTSLGAPAAFKFFDKIVDRKRYTSTKEVLNSTLIHQSITGLYETRIDLGKLGED

SEQ ID NO: 429 - protein, 1370 aa, Streptococcus agalactiae
  source 1..1370: note = COH1
MNKPYSIGLDIGTNSVGYSVVTDDYKVPAKKMRVLGNTDKEYIKKNLIGALLFDGGNTASDRRLKRTARRRYTRRRNRILYLQEIFAEEMSKVDDSFFHRLEDSFLVEDDKRGSKYPIFATMQEEKDYHEKFPTIYHLRKELADKKEKANLRLVYLALAHIIKFRGHFLIEDDSFDVRNTDIQRQYQAFLEIFDTTFENNHLLSQNIDVEGILTDKISKSAKKDRILAQYPNQKSTGIFAEFLKLIVGNQADFKKHFNLEDKTPLQFAKDSYDEDLENLLGQIGDEFADLFSVAKKLYDSVLLSGILTVTDLSTKAPLSASMIQRYDEHREDLKQLKQFVKASLPEKYQEIFTDSSKDGYAGYIEGKTNQGAFYKYLSKLLTKQEGSEYFLEKIKNEDFLRKQRTFDNGSIPHQVHLTELKAIIRRQSEYYPFLKENLDRIEKILTFRIPYYVGPLAREKSDFAWMTRKTDDSIRPWNFEELVDKEASAEAFIHRMTNNDLYLPEEKVLPKHSLIYEKFTVYNELTKVRYKNEQGETYFFDSNIKQEIFDGVFKEHRKVSKKKLLDFLAKEYEEFRIVDVIGLDKENKAFNASLGTYHDLKKILDKDFLDNPDNESILEDIVQTLTLFEDREMIKKRLENYKDLFTESQLKKLYRRHYTGWGRLSAKLINGIRDKESQKTILDYLISDGRANRNFMQLIHDDGLSFKPIIDKAQAGSHSDNLKEVVGELAGSPAIKKGILQSLKIVDELVKVMGYEPEQVVVEMARENQTTNQGRRNTRQRYKLLEEGVKNLASDLNGNILKEYPTDNQALQNERLFLYYLQNGRDMYTGEALDIDNLSQYDIDHIVPQAFIKDDSIDNRVLVSSAKNRGKSDNVPSIDIVKARKAFWKKLLDAKLMSQRKYDNLTKAERGGLTSDDKARFIQRQLVETRQITKHVARILDERFNNELDSKGRRIRKVKIVTLKSNLVSNFRKEFGFYKIREVNDYHHAHDAYLNAVVAKAILTKYPQLEPEFVYGDYPKYNSYKTRKSATEKLFFYSNIMNFFKTKVTLADGTVVVKDDIEVNNDTGEIVWDKKKHFATVRKVLSYPQVNIVKKTEIQTGGFSKESILAHGNSDKLIPRKTKDIYLDPKKYGGFDSPIVAYSVLVVADIKKGKAQKLKTVTELLGITIMERFRFEKNPSAFLESKGYLNIRDDKLMILPKYSLFELENGRRRLLASAGELQKGNELALPTQYMKFLYLASRYNELKGKPEEIEQKQEFVVQHVSYFDDILQIINDFSNRVILADANLEKINKLYQDNKENISVDELANNIINLFTFTSLGAPAAFKFFDKIVDRKRYTSTKEVLNSTLIHQSITGLYETRIDLGKLGED

SEQ ID NO: 430 - protein, 1370 aa, Streptococcus agalactiae
  source 1..1370: note = FSL S3-026
MNKPYSIGLDIGTNSVGWSIITDDYKVPAKKMRVLGNTDKEYIKKNLIGALLFDGGNTAADRRLKRTARRRYTRRRNRILYLQEIFAEEMSKVDDSFFHRLEDSFLVEEDKRGSKYPIFATMQEEKYYHEKFPTIYHLRKELADKKEKADLRLIYLALAHIIKFRGHFLIEDDRFDVRNTDIQKQYQAFLEIFDTTFENNDLLSQNVDVEAILTDKISKSAKKDRILARYPNQKSTGIFAEFLKLIVGNQADFKKHFNLEDKTPLQFAKDSYDEDLENLLGQIGDEFADLFSAAKKLYDSVLLSGILTVTDLSTKAPLSASMIQRYDEHREDLKQLKQFVKASLPEKYQEIFADSSKDGYAGYIEGKTNQEAFYKYLSKLLTKQEGSEYLLEKIKNEDFLRKQRTFDNGSIPHQVHLTELRAIIRRQSEYYPFLKENLDRIEKILTFRIPYYVGPLAREKSDFAWMTRKTDDSIRPWNFEDLVDKEKSAEAFIHRMTNNDLYLPEEKVLPKHSLIYEKFTVYNELTKVRFLAEGFKDFQFLNRKQKETIFNSLFKEKRKVTEKDIISFLNKVDGYEGIAIKGIEKQFNASLSTYHDLKKILGKDFLDNTDNELILEDIVQTLTLFEDREMIRKRLDIYKDFFTESQLKKLYRRHYTGWGRLSAKLINGIRNKENQKTILDYLIDDGSANRNFMQLIKDAGLSFKPIIDKARTGSHSDNLKEVVGELAGSPAIKKGILQSLKIVDELVKVMGYEPEQIVVEMARENQTTAKGLSRLRQRLTTLRESLANLKSNILEEKKPKYVKDQVENHHLSDDRLFLYYLQNGKDMYTDDELDIDNLSQYDIDHIIPQAFIKDDSIDNRVLVSSAKNRGKSDDVPSVEIVKDCKVFWKKLLDAKLMSQRKYDNLTKAERGGLTSDDKARFIQRQLVETRQITKHVARILDERFNNELDSKGRRIRKVKIVTLKSNLVSNFRKEFGFYKIREVNNYHHAHDAYLNAVVAKAILTKYPQLEPEFVYGDYPKYNSYKTRKSATEKLFFYSNIMNFFKTKVTLADGTVVVKDDIEVNNDTGEIVWDKKKHFATVRKVLSYPQVNIVKKTEIQTGGFSKESILAHGNSDKLIPRKTKDIYLDPKKYGGFDSPIVAYSVLVVADIKKGKAQKLKTVTELLGITIMERSRFEKNPSAFLESKGYLNIRDDKLMILPKYSLFELENGRRRLLASADELQKGNELALPTQFMKFLYLASRYNELKGKPEEIEQKQEFVVQHVSYFDDILQIINDFSNRVILADANLEKINKLYQDNKENIPVDELANNIINLFTFTSLGAPAAFKFFDKIVDRKRYTSTKEVLNSTLIHQSITGLYETRIDLGKLGED

SEQ ID NO: 431 - protein, 1370 aa, Streptococcus agalactiae
  source 1..1370: note = GB00112
MNKPYSIGLDIGTNSVGYSVVTDDYKVPAKKMRVLGNTDKEYIKKNLIGALLFDGGNTASDRRLKRTARRRYTRRRNRILYLQEIFAEEMSKVDDSFFHRLEDSFLVEDDKRGSKYPIFATMQEEKDYHEKFPTIYHLRKELADKKEKADLRLVYLALAHIIKFRGHFLIEDDSFDVRNTDIQRQYQAFLEIFDTTFENNHLLSQNIDVEGILTDKISKSAKKDRILAQYPNQKSTGIFAEFLKLIVGNQADFKKHFNLEDKTPLQFAKDSYDEDLENLLGQIGDEFADLFSVAKKLYDSVLLSGILTVTDLSTKAPLSASMIQRYDEHREDLKQLKQFVKASLPEKYQEIFTDSSKDGYAGYIEGKTNQGAFYKYLSKLLTKQEGSEYFLEKIKNEDFLRKQRTFDNGSIPHQVHLTELKAIIRRQSEYYPFLKENLDRIEKILTFRIPYYVGPLAREKSDFAWMTRKTDDSIRPWNFEELVDKEASAEAFIHRMTNNDLYLPEEKVLPKHSLIYEKFTVYNELTKVRYKNEQGETYFFDSNIKQEIFDGVFKEHRKVSKKKLLDFLAKEYEEFRIVDVIGLDKENKAFNASLGTYHDLKKILDKDFLDNPDNESILEDIVQTLTLFEDREMIKKRLENYKDLFTESQLKKLYRRHYTGWGRLSAKLINGIRDKESQKTILDYLISDGRANRNFMQLIHDDGLSFKPIIDKAQAGSHSDNLKEVVGELAGSPAIKKGILQSLKIVDELVKVMGYEPEQVVVEMARENQTTNQGRRNTRQRYKLLEEGVKNLASDLNGNILKEYPTDNQALQNERLFLYYLQNGRDMYTGEALDIDNLSQYDIDHIVPQAFIKDDSIDNRVLVSSAKNRGKSDNVPSIDIVKARKAFWKKLLDAKLMSQRKYDNLTKAERGGLTSDDKARFIQRQLVETRQITKHVARILDERFNNELDSKGRRIRKVKIVTLKSNLVSNFRKEFGFYKIREVNDYHHAHDAYLNAVVAKAILTKYPQLEPEFVYGDYPKYNSYKTRKSATEKLFFYSNIMNFFKTKVTLADGTVVVKDDIEVNNDTGEIVWDKKKHFATVRKVLSYPQVNIVKKTEIQTGGFSKESILAHGNSDKLIPRKTKDIYLDPKKYGGFDSPIVAYSVLVVADIKKGKAQKLKTVTELLGITIMERFRFEKNPSAFLESKGYLNIRDDKLMILPKYSLFELENGRRRLLASAGELQKGNELALPTQYMKFLYLASRYNELKGKPEEIEQKQEFVVQHVSYFDDILQIINDFSNRVILADANLEKINKLYQDNKENISVDELANNIINLFTFTSLGAPAAFKFFDKIVDRKRYTSTKEVLNSTLIHQSITGLYETRIDLGKLGED

SEQ ID NO: 432 - protein, 1370 aa, Streptococcus agalactiae
  source 1..1370: note = H36B
MNKPYSIGXDIGTNSVGWSIITDDYKVPAKKMRVLGNTDKEYIKKNLIGALLFDGGNTAADRRLKRTARRRYTRRRNRILYLQEIFAEEMSKVDDSFFHRLEDSFLVEEDKRGSKYPIFATLQEEKDYHEKFSTIYHLRKELADKKEKADLRLIYIALAHIIKFRGHFLIEDDSFDVRNTDISKQYQDFLEIFNTTFENNDLLSQNVDVEAILTDKISKSAKKDRILAQYPNQKSTGIFAEFLKLIVGNQADFKKYFNLEDKTPLQFAKDSYDEDLENLLGQIGDEFADLFSAAKKLYDSVLLSGILTVIDLSTKAPLSASMIQRYDEHREDLKQLKQFVKASLPEKYQEIFADSSKDGYAGYIEGKTNQEAFYKYLSKLLTKQEDSENFLEKIKNEDFLRKQRTFDNGSIPHQVHLTELKAIIRRQSEYYPFLKENQDRIEKILTFRIPYYIGPLAREKSDFAWMTRKTDDSIRPWNFEDLVDKEKSAEAFIHRMTNNDFYLPEEKVLPKHSLIYEKFTVYNELTKVRYKNEQGETYFFDSNIKQEIFDGVFKEHRKVSKKKLLDFLAKEYEEFRIVDVIGLDKENKAFNASLGTYHDLEKILDKDFLDNPDNESILEDIVQTLTLFEDREMIKKRLENYKDLFTESQLKKLYRRHYTGWGRLSAKLINGIRDKESQKTILDYLIDDGRSNRNFMQLINDDGLSFKSIISKAQAGSHSDNLKEVVGELAGSPAIKKGILQSLKIVDELVKVMGYEPEQIVVEMARENQTTNQGRRNSRQRYKLLDDGVKNLASDLNGNILKEYPTDNQALQNERLFLYYLQNGRDMYTGEALDIDNLSQYDIDHIIPQAFIKDDSIDNRVLVSSAKNRGKSDDVPSLEIVKDCKVFWKKLLDAKLMSQRKYDNLTKAERGGLTSDDKARFIQRQLVETRQITKHVARILDERFNNELDSKGRRIRKVKIVTLKSNLVSNFRKEFGFYKIREVNNYHHAHDAYLNAVVAKAILTKYPQLEPEFVYGDYPKYNSYKTRKSATEKLFFYSNIMNFFKTKVTLADGTVVVKDDIEVNNDTGEIVWDKKKHFATVRKVLSYPQNNIVKKTEIQTGGFSKESILAHGNSDKLIPRKTKDIYLDPKKYGGFDSPIVAYSVLVVADIKKGKAQKLKTVTELLGITIMERSRFEKNPSAFLESKGYLNIRADKLIILPKYSLFELENGRRRLLASAGELQKGNELALPTQFMKFLYLASRYNESKGKPEEIEKKQEFVNQHVSYFDDILQLINDFSKRVILADANLEKINKLYQDNKENISVDELANNIINLFTFTSLGAPAAFKFFDKIVDRKRYTSTKEVLNSTLIHQSITGLYETRIDLGKLGED

SEQ ID NO: 433 - protein, 1377 aa, Streptococcus agalactiae
MNKPYSIGLDIGTNSVGWSIITDDYKVPAKKMRVLGNTDKEYIKKNLIGALLFDGGNTAADRRLKRTARRRYTRRRNRILYLQEIFAEEMSKVDDSFFHRLEDSFLVEEDKRGSKYPIFATMQEEKYYHEKFPTIYHLRKELADKKEKADLRLVYLALAHIIKFRGHFLIEDDRFDVRNTDIQKQYQAFLEIFDTTFENNHLLSQNVDVEAILTDKISKSAKKDRILAQYPNQKSTGIFAEFLKLIVGNQADFKKHFNLEDKTPLQFAKDSYDEDLENLLGQIGDEFADLFSVAKKLYDSVLLSGILTVTDLSTKAPLSASMIQRYDEHHEDLKHLKQFVKASLPENYREVFADSSKDGYAGYIEGKTNQEAFYKYLLKLLTKQEGSEYFLEKIKNEDFLRKQRTFDNGSIPHQVHLTELRAIIRRQSEYYPFLKENQDRIEKILTFRIPYYVGPLAREKSDFAWMTRKTDDSIRPWNFEDLVDKEKSAEAFIHRMTNNDLYLPEEKVLPKHSLIYEKFTVYNELTKVRFLAEGFKDFQFLNRKQKETIFNSLFKEKRKVTEKDIISFLNKVDGYEGIAIKGIEKQFNASLSTYHDLKKILGKDFLDNTDNELILEDIVQTLTLFEDREMIKKCLDIYKDFFTESQLKKLYRRHYTGWGRLSAKLINGIRNKENQKTILDYLIDDGSANRNFMQLINDDDLSFKPIIDKARTGSHSDNLKEVVGELAGSPAIKKGILQSLKIVDELVKVMGYEPEQIVVEMARENQTTAKGLSRSRQRLTTLRESLANLKSNILEEKKPKYVKDQVENHHLSDDRLFLYYLQNGRDMYTKKALDIDNLSQYDIDHIIPQAFIKDDSIDNRVLVSSAKNRGKSDDVPSIEIVKARKMFWKNLLDAKLMSQRKYDNLTKAERGGLTSDDKARFIQRQLVETRQITKHVARILDERFNNEVDNGKKICKVKIVTLKSNLVSNFRKEFGFYKIREVNDYHHAHDAYLNAVVAKAILTKYPQLEPEFVYGMYRQKKLSKIVHEDKEEKYSEATRKMFFYSNLMNMFKRVVRLADGSIVVRPVIETGRYMRKTAWDKKKHFATVRKVLSYPQNNIVKKTEIQTGGFSKESILAHGNSDKLIPRKTKDIYLDPKKYGGFDSPIVAYSVLVVADIKKGKAQKLKTVTELLGITIMERSRFEKNPSAFLESKGYLNIRDDKLMILPKYSLFELENGRRRLLASAGELQKGNELALPTQFMKFLYLASRYNESKGKPEEIEKKQEFVNQHVSYFDDILQLINDFSKRVILADANLEKINKLYQDNKENIPVDELANNIINLFTFTSLGAPAAFKFFDKIVDRKRYTSTKEVLNSTLIHQSITGLYETRIDLGKLGED

SEQ ID NO: 434 - protein, 1370 aa, Streptococcus agalactiae
MNKPYSIGLDIGTNSVGWSIITDDYKVPAKKMRVLGNTDKEYIKKNLIGALLFDGGNTAADRRLKRTARRRYTRRRNRILYLQEIFAEEMSKVDDSFFHRLEDSFLVEEDKRGSKYPIFATMQEEKDYHEKFPTIYHLRKELADKKEKADLRLVYLALAHIIKFRGHFLIEDDRFDVRNTDIQKQYQAFLEIFDTSFENNHLLSQNVDVEAILTDKISKSAKKDRILAQYPNQKSTGIFAEFLKLIVGNQADFKKHFNLEDKTPLQFAKDSYDEDLENLLGQIGDEFADLFSAAKKLYDSVLLSGILTVTDLSTKAPLSASMIQRYDEHREDLKQLKQFVKASLPEKYQEIFADSSKDGYAGYIEGKTNQEAFYKYLSKLLTKQEDSEYFLEKIKNEDFLRKQRTFDNGSIPHQVHLTELKAIIRRQSEYYPFLKENQDKIEKILTFRIPYYVGPLARGNSDFAWMTRKTDDSIRPWNFEDLVDKEKSAEAFIHRMTNNDLYLPEEKVLPKHSLIYEKFTVYNELTKVRYKNEQGETYFFDSNVKQEIFDGVFKEHRKVSKKQLLDFLAKEFEEFRIVDVTGLDKENKAFNASLGTYHDLKKILDKDFLDNPDNESILEDIVQTITLFEDREMIKKRLENYKDLFTESQLKKLYRRHYTGWGRLSAKLINGIRDRESQKTILDYLISDGRANRNFMQLINDDGLSFKSIISKAQSGSHSDNLKEVVGELAGSPAIKKGILQSLKIVDELVKVMGYEPEQIVVEMARENQTTNQGRRNSRQRYKLLEDGVKNLASDLNGDILKEYPTDNQALQNERLFLYYLQNGRDMYTGEALDIDNLSQYDIDHIVPQAFIKDDSIDNRVLVSSAKNRGKSDDVPSIDIVKARKAFWKKLLDAKLISQRKYDNLTKAERGGLTPDDKAGFIQRQLVETRQITKHVARILDERFNNKVDDNNKPIRKVKIVTLKSNLVSNFRKEFGFYKIREVNNYHHAHDAYLNAVVAKAILTKYPQLEPEFVYGDYPKYNSYKTRKSATEKLFFYSNIMNFFKTKVTLADETVVVKDDIEVNNETGEIAWDKKKHFATVRKVLSYPQVNIVKKTEVQTGGFSKESILAHSNSDKLIPRKTKDIYLDPKKYGGFDSPIVAYSVLVLADIKKGKAQKLKTVKELIGITIMERERFEKNPSAFLESKGYLNIRTDKLIILPKYSLFELENGRRRLLASAGELQKGNELALPTQYMKFLYLASRYNESKGKPEEIEKKQEFVNQHVSYFDDILQLINDFSKRVILADANLEKINKLYSDNKDNTPVDELAKNIINLFTFTSLGAPAAFKFFDKSVDRKRYTSTKEVLDSTLIHQSITGLYETRIDLGKLGED

SEQ ID NO: 435 - protein, 1370 aa, Streptococcus agalactiae
  source 1..1370: note = STIR-CD-17
MNKPYSIGLDIGTNSVGWSIITDDYKVPAKKMRVLGNTDKEYIKKNLIGALLFDGGNTAADRRLKRTARRRYTRRRNRILYLQEIFAEEMSKVDDSFFHRLEDSFLVEEDKRGSKYPIFATMQEEKDYHEKFPTIYHLRKELADKKEKADLRLVYLALAHIIKFRGHFLIEDDRFDVRNTDIQKQYQAFLEIFDTSFENNHLLSQNVDVEAILTDKISKSAKKDRILAQYPNQKSTGIFAEFLKLIVGNQADFKKHFNLEDKTPLQFAKDSYDEDLENLLGQIGDEFADLFSAAKKLYDSVLLSGILTVTDLSTKAPLSAYMIQRYDEHREDLKQLKQFVKASLPEKYQEIFADSSKDGYAGYIEGKTNQEAFYKYLSKLLTKQEDSEYFLEKIKNEDFLRKQRTFDNGSIPHQVHLTELKAIIRRQSEYYPFLKENQDKIEKILTFRIPYYVGPLARGNSDFAWMTRKTDDSIRPWNFEDLVDKEKSAEAFIHRMTNNDLYLPEEKVLPKHSLIYEKFTVYNELTKVRYKNEQGETYFFDSNVKQEIFDGVFKEHRKVSKKQLLDFLAKEFEEFRIVDVTGLDKENKAFNASLGTYHDLKKILDKDFLDNPDNESILEDIVQTITLFEDREMIKKRLENYKDLFTESQLKKLYRRHYTGWGRLSAKLINGIRDRESQKTILDYLISDGRANRNFMQLINDDGLSFKSIISKAQSGSHSDNLKEVVGELAGSPAIKKGILQSLKIVDELVKVMGYEPEQIVVEMARENQTTNQGRRNSRQRYKLLEDGVKNLASDLNGDILKEYPTDNQALQNERLFLYYLQNGRDMYTGEALDIDNLSQYDIDHIVPQAFIKDDSIDNRVLVSSAKNRGKSDDVPSIDIVKARKAFWKKLLDAKLISQRKYDNLTKAERGGLTPDDKAGFIQRQLVETRQITKHVARILDERFNNKVDDNNKPIRKVKIVTLKSNLVSNFRKEFGFYKIREVNNYHHAHDAYLNAVVAKAILTKYPQLEPEFVYGDYPKYNSYKTRKSATEKLFFYSNIMNFFKTKVTLADETVVVKDDIEVNNETGEIAWDKKKHFATVRKVLSYPQVNIVKKTEVQTGGFSKESILAHSNSDKLIPRKTKDIYLDPKKYGGFDSPIVAYSVLVLADIKKGKAQKLKTVKELIGITIMERERFEKNPSAFLESKGYLNIRTDKLIILPKYSLFELENGRRRLLASAGELQKGNELALPTQYMKFLYLASRYNESKGKPEEIEKKQEFVNQHISYFDDILQLINDFSKRVILADANLEKINKLYSDNKDNTPVDELAKNIINLFTFTSLGAPAAFKFFDKSVDRKRYTSTKEVLDSTLIHQSITGLYETRIDLGKLGED

SEQ ID NO: 436 - protein, 1125 aa, Streptococcus anginosus
  source 1..1125: note = 1_2_62CV
MNGLVLGLDIGIASVGVGILNKETGEIIHANSRIFPAATADSNVERRGFRQGRRLGRRKKHRSARLNNLFEEFGFITDFSAIPLNLNPYALRVKGLSEELTNEELFIALKNIIKRRGISYLDDASEDGETASNEYGKAVEENRKLLADKTPGQIQLERFEKYGQVRGDFTVVENGENHRLINVFSTSAYKKEAERILRRQQEFNVRISDEFIEAYLTILTGKRKYYHGPGNEKSRTDYGRFRTDGTTLDNIFGILIGKCTFYPDEYRAAKASYTAQEFNLLNDLNNLTVPTETKKLSPEQKRQIVEYARTAKTLGTPTLLKYIAKLVDGSIDDIKGYRIDKSDKPEMHTFDAYRKMRTLDLVNIDALSRETLDDLAHILTLNTESEGILEALNSKMPSTFTKEQIDELIQFRKKNSAVFGKGWHNFSLKLMNELISELYETSEEQMTILTRLGKQRSREISKRTKYIDEKELTEEIYNPVVAKSVRQAIKIINEATKRYGIFDNIVIEMARENNEEDAKKDYIKRQKANQDEKNASMEKAAFQYNGKKELPDSIFHGHKELATKIRLWHQQGERCLYTGKNISIRDLIHNPHQYEIDHILPLSLSFDDGLANKVLVLATANQEKGQRTPFQAIDSMDDAWSYREFKQYVRNSKSLSNKKKDYLLTEEDISKIEVKQKFIERNLVDTRYSSRVVLNTLQEFYKTNDFDTKISVVRGQFTSQLRRKWKIEKSRDTYHHHAVDALIIAASSQLRLWKKQNNPLISYKEGQFVDPETGEILSLTDDEYKELVFRPPYDYFVDTLKSKSFEDSILFSYQVDSKYNRKISDATIYGTRKAQLGKDKQEETYVLGKIKDIYSQKGYEDFIKRYNKDETQFLIYHKDPQTFEKVIEEILKTYPDKELNEKGKEIPCNPFEKYRQENGPIRKYSKKGKGPEIKSLKYYDNKLGNHIDITPVNSQNQVVLQSLKPWRTDVYFNPRTSKYELMGLKYSDLRFEKGSGSYGISPEKYNKVKAKEGVNEDSEFKFTLYKNDLILIKDTETGEQQLFRYGSRNDTSKHYVELKPYEKAKFEGNQQLMNLLGTVAKGGQCLKGINKPNLSIYKVKTDVLGNKYFIKKEGDQPQLNFKKKF

SEQ ID NO: 437 - protein, 1345 aa, Streptococcus anginosus
  source 1..1345: note = F0211
MDQKYSIGLDIGTNSVGWAVVTDDYKVPAKKMKVLGNTDKQSIKKNLLGALLFDSGETAEATRLKRTARRRYTRRRNRLRYLQEIFAEEMNKVDENFFQRLDDSFLVDEDKRGERHPIFGNIAAEVKYHDDFPTIYHLRKHLADISQKADLRLVYLALAHMIKFRGHFLIEGQLKAENTNVQALFKDFVEVYDKTVEESHLSEMTVDALSILTEKVSKSRRLENLIAHYPAEKKNTLFGNLIALSLGLQPNFKTNFQLSEDAKLQFSKDTYEEDLEGLLGEIGDEYADLFASAKNLYDAILLSGILTVDDNSTKAPLSASMVKRYEEHQKDLKKLKDFIKVNAPDQYNAIFKDKNKKGYAGYIENGVKQDEFYKYLKGILLQINGSGDFLDKIDREDFLRKQRTFDNGSIPHQIHLQEMHAILRRQEEHYPFLKENQDKIEKILTFRIPYYVGPLARKGSRFAWAEYKADEKITPWNFDDILDKEKSAEKFITRMTLNDLYLPEEKVLPKHSLLYETFTVYNELTKVKYVNEQGEAKFFDANMKQEIFDHVFKENRKVTKDKLLNYLNKEFEEFRIVNLTGLDKENKAFNSSLGTYHDLRKILDKSFLDDKANEKTIEDIIQTLTLFEDREMIRQRLQKYSDIFTKAQLKKLERRHYTGWGRLSYKLINGIRNKENKKTILDYLIDDGYANRNFMQLINDDALSFKEEIARAQIIGDVDDIANVVHDLPGSPAIKKGILQSVKIVDELVKVMGHNPANIIIEMARENQMTDKGRRNSQQRLKLLQDSLKNLDNPVNIKNVENQQLQNDRLFLYYIQNGKDMYTGETLDINNLSQYDIDHIIPQAFIKDNSLDNRVLTRSDKNRGKSDDVPSIEVVHEMKSFWSKLLSVKLITQRKFDNLTKAERGGLTEEDKAGFIKRQLVETRQITKHVAQILDERFNTEFDGNKRRIRNVKIITLKSNLVSNFRKEFELYKVREINDYHHAHDAYLNAVVGNALLLKYPQLEPEFVYGEYPKYNSYRSRKSATEKFLFYSNILRFFKKEDIQTNEDGEIAWNKEKHIKILRKVLSYPQVNIVKKTEEQTGGFSKESILPKGESDKLIPRKTKNSYWNPKKYGGFDSPVVAYSILVFADVEKGKSKKLRKVQDMVGITIMEKKRFEKHPVDFLEQRGYRNVRLEKIIKLPKYSLFELENKRRRLLASARELQKGNELVIPQRFTTLLYHSYQIEKNYEPEHREYVEKHKDEFKELLEYISVFSRKYVLADNNLTKIEMLFSKNKDAEVSSLAKSFISLLTFTAFGAPAAFNFFGENIDRKRYTSVTECLNATLIHQSITGLYETRIDLSKLGED

SEQ ID NO: 438 - protein, 1386 aa, Streptococcus anginosus
  source 1..1386: note = SK1138
MNQKYSIGLDIGTNSVGWAVITDDYKVPAKKMKVLGNTDKQSIKKNLLGALLFDSGETAEATRLKRTARRRYTRRRNRLRYLQEIFAEEMMQVDESFFQRLDDSFLVDEDKRGERHPIFGNIAAEVKYHDEFPTIYHLRKHLADISQKADLRLVYLALAHMIKFRGHFLIEGQLKAENTNVQALFKDFVEVYDKTVEESHLSEITVDALSILTEKVSKSRRLENLIAHYPAEKKNTLFGNLIALFLGLQPNFKTNFQLSEDAKLQFSKDTYEEDLEGLLGEVGDEYADLFASAKNLYDAILLSGILTVDDNSTKAPLSASMVKRYEEHQKDLKKFEDFIKVNALDQYNAIFKDKNKKGYAGYIESGVKQDEFYKYLKGILLQINGSGDFLDKIDREDFLRKQRTFDNGSIPHQIHLQEMHAILRRQGEHYPFLKENQDKIEKILTFRIPYYVGPLARKGSRFAWAEYKADEKITPWNFDDILDKEKSAEKFITRMTLNDLYLPEEKVLPKHSLLYETFTVYNELTKVKYVNEQGEAKFFDANMKQEIFDHVFKENRKVTKDKLLNYLNKEFEEFRIVNLTGLDKENKVFNSSLGTYHDLRKILNKSFLDNKENAQIIEDIIQTLTLFEDREMIRQRLQKYSDIFTKAQLKKLERRHYTGWGRLSYKLINGIRNKENKKTILDYLIDDGYANRNFMQLINDDALSFKEEIAKAQIIGDVDDIANVVHDLPGSPAIKKGILQSVKIVDELVKVMGHNPANIIIEMARENQTTDRGRRNSQQRLKLLQDSLKNLDNPVNIKNVENQQLQNDRLFLYYIQNGKDMYTGETLDINNLSQYDIDHIIPQAYIKDDSFDNRVLTSSSENRGKSDNVPSIEVVCARKADWMRLRKAGLISQRKFDNLTKAERGGLTENDKAGFIKRQLVETRQITKHVAQVLDARFNAKHDENKKVIRDVKIITLKSNLVSQFRKDFKFYKVREINDYHHAHDAYLNAVIGTALLKKYPKLASEFVYGEFKKYDVRKFIAKSDKEIGKATAKYFFYSNLMNFFKKEVKFADGTVVERPDIETSEDGEIAWNKQTDFKIVRKVLSYPQVNIVKKTEVQTHGLDRGKPRGLFNANPSPKPKPDSSENLVGVKRNLDPKKYGGYAGISNSYAVLVKAIIEKGVKKKETMVLEFQGISILDRITFEKDKRAFLLGKGYKDIKKIIELPKYSLFELKDGSRRMLASILSTNNKRGEIHKGNELFVPQKFTTLLYHAKRINNPINKDHIEYVKKHRDDFKELLNYVLEFNEKYVGATKNGERLKEAVADFDSKSNEEICTSFLGAVNSKNAGLFELTSLGSASDFEFLGVKIPRYRDYTPSSLLKDSTLIHQSITGLYETRIDLSKLGED

SEQ ID NO: 439 - protein, 1396 aa, Streptococcus anginosus
  source 1..1396: note = SK52 = DSM 20563
MTKPYSIGLDIGTNSVGWAVITDDYKVPAKKMKVLGNTNRDYIKKNLLGALLFDGGETAEGRRLKRTARRRYTRRKNRLRYLQEIFAEEMMQVDESFFQRLDDSFLVEEDKQGSKYPIFGTLKEEKEYHKKFKTIYHLREELANSKEKADLRLVYLALAHMIKFRGHFLYEGDLKAENTDVQALFKDFVEEYDKTIEESHLSEITVDALSILTEKVSKSSRLENLIAHYPTEKKNTLFGNLIALSLGLQANFKTNFQLSEDAKLQFSKDTYEEDLEGLLGEVGDEYADLFVSAKNLYDAILLSGILTVDDNSTKAPLSASMVKRYKEHKEELAAFKRFIKEKLPKKYEEIFKDDTKNGYAGYVGADKKLRKRSGKLATEEEFYKYVKGILNKVEGADYFLDKIDREDFLRKQRTFDNGSIPHQIHLQEMHAILRRQGEHYPFLKENQDKIEKILTFRIPYYVGPLARKGSRFAWAEYKADEKITPWNFDDILDKEKSAEKFITRMTLNDLYLPEEKVLPKHSPLYETFTVYNELTKVKYVNEQGEAKFFDTNMKQEIFDHVFKENRKVTKDKLLNYLNKEFEEFRIVNLTGLDKENKAFNASLGTYHDLRKILDKSFLDDKVNEKIIEDIIQTLTLFEDREMIRQRLQKYSDIFTTQQLKELERRHYTGWGRLSYKLINGIRNKENKKTILDYLIDDGYANRNFMQLINDDALSFKEEIARAQIIGDVDDIANVVHDLPGSPAIKKGILQSVKIVDELVKVMGHNPTNIIIEMARENQTTDKGRRNSQQRLKLLQDSLKNLDNPVNIKNVENQQLQNDRLFLYYIQNGKDMYTGETLDINNLSQYDIDHIIPQAFIKDNSLDNRVLTRSDKNRGKSDDVPSIEVVHEMKSFWSKLLSVKLITQRKFDNLTKAERGGLTENDKAGFIKRQLVETRQITKHVAQVLDARFNAKHDENKKVIRDVKIITLKSNLVSQFRKDFKFYKVREINDYHHAHDAYLNAVIGTALLKKYPKLASEFVYGEFKKYDVRKFIAKSDKEIGKATAKYFFYSNLMNFFKKEVKFADGTVVERPDIETSEDGEIAWNKQTDFKIVRKVLSYPQVNIVKKTEVQTHGLDRGKPRGLFNANPSPKPKPDSSENLVGIKRNLDPKKYGGYAGISNSYAVLVKAIIEKGVKKKETMVLEFQGISILDRITFEKDKRAFLLGKGYKDIKKIIELPKYSLFELKDGSRRMLASILSTNNKRGEIHKGNELFVPQKFTTLLYHAKRINNPINKDHIEYVKKHRDDFKELLNYVLEFNEKYVGATKNGERLKEAVADFDSKSNEEICTSFLGAVNSKNAGLFELTSLGSASDFEFLGVKIPRYRDYTPSSLLKDSILIHQSITGLYETRIDLSKLGED

SEQ ID NO: 440 - protein, 1373 aa, Streptococcus bovis
  source 1..1373: note = ATCC 700338
MTKKNYSIGLDIGTNSVGWAVITDDYKVPAKKMKVLGNTDKKYIKKNLLGALLFDSGETAEATRLKRTARRRYTRRKNRLRYLQEIFAEEMTKVDESFFQRLDESFLRWDDDNKKLGRYPIFGNKADVVKYHQEFPTIYHLRKHLADSSEKADLRLVYLALAHMIKFRGHFLIEGELNAENTDVQKIFADFVGVYDRTFDDSHLSEITVDAASILTEKISKSRRLENLIKYYPTEKKNTLFGNLIALALGLQPNFKMNFKLSEDAKLQFSKDSYEEDLGELLGKIGDDYADLFTSAKNLYDAILLSGILIVDDNSTKAPLSASMIKRYVEHQEDLEKLKEFIKANKSELYHDIFKDKNKNGYAGYIENGVKQDEFYKYLKNTLSKIAGSDYFLDKIEREDFLRKQRTFDNGSIPHQIHLQEMHAILRRQGDYYPFLKENQDRIEKILTFRIPYYVGPLARKDSRFSWAEYHSDEKITPWNFDKVIDKEKSAEKFITRMTLNDLYLPEEKVLPKHSHVYETYAVYNELTKIKYVNEQGKDSFFDSNMKQEIFDHVFKENRKVTKEKLLNYLNKEFPEYRIKDLIGLDKENKSFNASLGTYHDLKKILDKAFLDDKVNEEVIEDIIKTLTLFEDKDMIHERLQKYSDIFTADQLKKLERRHYTGWGRLSYKLINGIRNKENNKTILDYLIDDGSANRNFMQLINDDTLPFKQIIQKSQVVGDVDDIEAVVHDLPGSPAIKKGILQSVKIVDELVKVMGDNPDNIVIEMARENQTTNRGRSQSQQRLKKLQNSLKELGSNILNEEKPSYIEDKVENSHLQNDQLFLYYIQNGKDMYTGDELDIDHLSDYDIDHIIPQAFIKDDSIDNRVLTSSAKNRGKSDDVPSLDIVRARKAEWVRLYKSGLISKRKFDNLTKAERGGLTEADKAGFIKRQLVETRQITKHVAQILDARFNTESDENDKVIRDVKVITLKSNLVSQFRKDFEFYKVREINDYHHAHDAYLNAVVGTALLKKYPKLASEFVYGEYKKYDIRKFITNSSDKATAKYFFYSNLMNFFKRVIRYSNGKVIVRPVVEYSKDTEDIAWDKKSNFRTICKVLSYPQVNIVKKVETQTGGFSKESILPKGDSDKLIPRKTKKAYWDTKKYGGFDSPTVAYSVFVVADVEKGKAKKLKTVKELVGISIMERSFFEENPVEFLENKGYHNIREDKLIKLPKYSLFEFEGGKRRLLASASELQKGNEMVIPGHLVKLLYHAQRINSFNSTKYLDYVSAHKKEFEKVLSCVEDFANLYVDVEKNLSKIRAVADSMDNFSIEEISNSFINLLTLTALGAPADFNFLGEKIPRKRYTSTKECLNATLIHQSITGLYETRIDLSKIGEE

SEQ ID NO: 441 - protein, 1375 aa, Streptococcus canis
  source 1..1375: note = FSL Z3-227
MEKKYSIGLDIGTNSVGWAVITDDYKVPSKKFKVLGNTNRKSIKKNLMGALLFDSGETAEATRLKRTARRRYTRRKNRIRYLQEIFANEMAKLDDSFFQRLEESFLVEEDKKNERHPIFGNLADEVAYHRNYPTIYHLRKKLADSPEKADLRLIYLALAHIIKFRGHFLIEGKLNAENSDVAKLFYQLIQTYNQLFEESPLDEIEVDAKGILSARLSKSKRLEKLIAVFPNEKKNGLFGNIIALALGLTPNFKSNFDLTEDAKLQLSKDTYDDDLDELLGQIGDQYADLFSAAKNLSDAILLSDILRSNSEVTKAPLSASMVKRYDEHHQDLALLKTLVRQQFPEKYAEIFKDDTKNGYAGYVGIGIKHRKRTTKLATQEEFYKFIKPILEKMDGAEELLAKLNRDDLLRKQRTFDNGSIPHQIHLKELHAILRRQEEFYPFLKENREKIEKILTFRIPYYVGPLARGNSRFAWLTRKSEEAITPWNFEEVVDKGASAQSFIERMTNFDEQLPNKKVLPKHSLLYEYFTVYNELTKVKYVTERMRKPEFLSGEQKKAIVDLLFKTNRKVTVKQLKEDYFKKIECFDSVEIIGVEDRFNASLGTYHDLLKIIKDKDFLDNEENEDILEDIVLTLTLFEDREMIEERLKTYAHLFDDKVMKQLKRRHYTGWGRLSRKMINGIRDKQSGKTILDFLKSDGFSNRNFMQLIHDDSLTFKEEIEKAQVSGQGDSLHEQIADLAGSPAIKKGILQTVKIVDELVKVMGHKPENIVIEMARENQTTTKGLQQSRERKKRIEEGIKELESQILKENPVENTQLQNEKLYLYYLQNGRDMYVDQELDINRLSDYDVDHIVPQSFIKDDSIDNKVLTRSVENRGKSDNVPSEEVVKKMKNYWRQLLNAKLITQRKFDNLTKAERGGLSEADKAGFIKRQLVETRQITKHVARILDSRMNTKRDKNDKPIREVKVITLKSKLVSDFRKDFQLYKVRDINNYHHAHDAYLNAVVGTALIKKYPKLESEFVYGDYKVYDVRKMIAKSEQEIGKATAKRFFYSNIMNFFKTEVKLANGEIRKRPLIETNGETGEVVWNKEKDFATVRKVLAMPQVNIVKKTEVQTGGFSKESILSKRESAKLIPRKKGWDTRKYGGFGSPTVAYSILVVAKVEKGKAKKLKSVKVLVGITIMEKGSYEKDPIGFLEAKGYKDIKKELIFKLPKYSLFELENGRRRMLASATELQKANELVLPQHLVRLLYYTQNISATTGSNNLGYIEQHREEFKEIFEKIIDFSEKYILKNKVNSNLKSSFDEQFAVSDSILLSNSFVSLLKYTSFGASGGFTFLDLDVKQGRLRYQTVTEVLDATLIYQSITGLYETRTDLSQLGGD

SEQ ID NO: 442 - protein, 1345 aa, Streptococcus constellatus
  source 1..1345: note = subsp. constellatus SK53
MGKPYSIGLDIGTNSVGWAVVTDDYKVPAKKMKVLGNTDKQSIKKNLLGALLFDSGETAEATRLKRTARRRYTRRKNRLRYLQEIFTGEMNKVDENFFQRLDDSFLVDEDKRGEHHPIFGNIAAEVKYHDDFPTIYHLRRHLADTSKKADLRLVYLALAHMIKFRGHFLYEGDLKAENTDVQALFKDFVEEYDKTIEESHLSEITVDALSILTEKVSKSSRLENLIAHYPTEKKNTLFGNLIALSLDLHPNFKTNFQLSEDAKLQFSKDTYEEDLEGFLGEVGDEYADLFASAKNLYDAILLSGILTVDDNSTKAPLSASMVKRYEEHQKDLKKLKDFIKVNAPDQYNAIFKDKNKKGYASYIESGVKQDEFYKYLKGILLKINGSGDFLDKIDREDFLRKQRTFDNGSIPHQIHLQEMHAILRRQGEHYPFLKENQDKIEKILTFRIPYYVGPLARKGSRFAWAEYKADEKITPWNFDDILDKEKSAEKFITRMTLNDLYLPEEKVLPKHSPLYEAFTVYNELTKVKYVNEQGEAKFFDTNMKQEIFDHVFKENRKVTKDKLLNYLNKEFEEFRIVNLTGLDKENKAFNSSLGTYHDLRKILDKSFLDDKANEKTIEDIIQTLTLFEDREMIRQRLQKYSDIFTKAQLKKLERRHYTGWGRLSYKLINGIRNKENKKTILDYLIDDGYANRNFMQLINDDALSFKEEIARAQIIDDVDDIANVVHDLPGSPAIKKGILQSVKIVDELVKVMGHNPANIIIEMARENQTTDKGRRNSQQRLKLLQDSLKNLDNPVNIKNVENQQLQNDRLFLYYIQNGKDMYTGETLDINNLSQYDIDHIIPQAFIKDNSLDNRVLTRSDKNRGKSDDVPSIEVVHEMKSFWSKLLSVKLITQRKFDNLTKAERGGLTEEDKAGFIKRQLVETRQITKHVAQILDERFNTEFDGNKRRIRNVKIITLKSNLVSNFRKEFELYKVREINDYHHAHDAYLNAVVGNALLLKYPQLEPEFVYGEYPKYNSYRSRKSATEKFLFYSNILRFFKKEDIQTNEDGEIAWNKEKHIKILRKVLSYPQVNIVKKTEEQTGGFSKESILPKGESDKLIPRKTKNSYWDPKKYGGFDSPVVAYSILVFADVEKGKSKKLRKVQDMVGITIMEKKRFEKNPVDFLEQRGYRNVRLEKIIKLPKYSLFELENKRRRLLASAKELQKGNELVIPQRFTTLLYHSYRIEKDYEPEHREYVEKHKDEFKELLEYISVFSRKYVLADNNLTKIEMLFSKNKDAEVSSLAKSFISLLTFTAFGAPAAFNFFGENIDRKRYTSVTECLNATLIHQSITGLYETRIDLSKLGED

SEQ ID NO: 443 - protein, 1371 aa, Streptococcus dysgalactiae
MDKKYSIGLDIGTNSVGWAVITDDYKVPSKKFKVLGNTDRHSIKKNLIGALLFDSGETAEATRLKRTARRRYTRRKNRIRYLQEIFSSEMSKVDDSFFHRLEESFLVEEDKKHERHPIFGNIVDEVAYHEKYPTIYHLRKKLADSTDKADLRLIYLALAHMIKFRGHFLIEGDLNPDNSDMDKLFIQLVQTYNQLFEENPINASRVDAKAILSARLSKSRRLENLIAQLPGEKRNGLFGNLIALSLGLTPNFKSNFDLAEDAKLQLSKDTYDDDLDNLLAQIGDQYADLFLAAKNLSDAILLSDILRVNSEITKAPLSASMIKRYDEHHQDLTLLKALVRQQLPEKYKEIFFDQSKNGYAGYIDGGASQEEFYKFIKPILEKMDGTEELLAKLNREDLLRKQRTFDNGSIPHQIHLGELHAILRRQEDFYPFLKDNREKIEKILTFRIPYYVGPLARGNSRFAWMTRKSEETITPWNFEEVVDKGASAQSFIERMTNFDKNLPNEKVLPKHSLLYEYFTVYNELTKVKYVTEGMRKPEFLSGKQKEAIVDLLFKTNRKVTVKQLKEDYFKKIECFDSVEISGVEDRFNASLGTYHDLLKIIKDKDFLDNEENEDILEDIVLTLTLFEDKEMIEERLKKYANLFDDKVMKQLKRRHYTGWGRLSRKLINGIRDKQSGKTILDFLKSDGFANRNFMQLINDDSLTFKEAIQKAQVSGQGHSLHEQIANLAGSPAIKKGILQSVKVVDELVKVMGHKPENIVIEMARENQTTQKGQKNSRERMKRIEEGIKELGSQILKEHPVENTQLQNEKLYLYYLQNGRDMYVDQELDINRLSDYDVDHIVPQSFIKDDSIDNKVLTRSDKNRGKSDNVPSEEVVKKMKNYWRQLLNAKLITQRKFDNLTKAERGGLSELDKAGFIKRQLVETRQITKHVAQILDSRMNTKYDENDKLIREVKVITLKSKLVSDFRKDFQFYKVREINNYHHAHDAYLNAVVGTALIKKYPKLESEFVYGDYKVYDVRKMIAKSEQEIGKATAKRFFYSNIMNFFKTEITLANGEIRKRPLIETNEETGEIVWDKGRDFATVRKVLSMPQVNIVKKTEVQTGALTNESIYARGSFDKLISRKHRFESSKYGGFGSPTVTYSVLVVAKSKVQDGKVKKIKTGKELIGITLLDKLVFEKNPLKFIEDKGYGNVQIDKCIKLPKYSLFEFENGTRRMLASVMANNNSRGDLQKANEMFLPAKLVTLLYHAHKIESSKELEHEAYILDHYNDLYQLLSYIERFASLYVDVEKNISKVKELFSNIESYSISEICSSVINLLTLTASGAPADFKFLGTTIPRKRYGSPQSILSSTLIHQSITGLYETRIDLSQLGGD

SEQ ID NO: 444 - protein, 1371 aa, Streptococcus dysgalactiae
MDKKYSIGLDIGTNSVGWAVITDDYKVPSKKFKVLGNTDRHSIKKNLIGALLFDSGETAEATRLKRTARRRYTRRKNRIRYLQEIFSSEMSKVDDSFFHRLEESFLVEEDKKHERHPIFGNIVDEVAYHEKYPTIYHLRKKLADSTDKADLRLIYLALAHMIKFRGHFLIEGDLNPDNSDVDKLFIQLVQTYNQLFEEKPINASGVDAKAILSARLSKSKRLENLIAQLPGEKKNGLFGNLIALSLGLTPNFKSNFDLAEDAKLQLSKDTYDDDLDNLLAQIGNQYADLFLAAKNLSDAILLSDILRVNSEITKAPLSASMIKRYDEHHQDLTLLKALVRQQLPEKYKEIFFDQSKNGYAGYIDGGASQEEFYKFIKPILEKMDGTEELLAKLNREDLLRKQRTFDNGSIPHQIHLGELHAILRRQEDFYPFLKDNREKIEKILTFRIPYYVGPLARGNSRFAWMTRKSEETITPWNFEEVVDKGASAQSFIERMTNFDKNLPNEKVLPKHSLLYEYFTVYNELTKVKYVTEGMRKPEFLSGKQKEAIVDLLFKTNRKVTVKQLKEDYFKKIECFDSVEISGVEDRFNASLGTYHDLLKIIKDKDFLDNEENEDILEDIVLTLTLFEDKEMIEERLKKYANLFDDKVMKQLKRRHYTGWGRLSRKLINGIRDKQSGKTILDFLKSDGFANRNFMQLINDDSLTFKEAIQKAQVSGQGHSLHEQIANLAGSPAIKKGILQSVKVVDELVKVMGHKPENIVIEMARENQTTQKGQKNSRERMKRIEEGIKELGSQILKEHPVENTQLQNEKLYLYYLQNGRDMYVDQELDINRLSDYDVDHIVPQSFIKDDSIDNKVLTRSDKNRGKSDNVPSEEVVKKMKNYWRQLLNAKLITQRKFDNLTKAERGGLSELDKAGFIKRQLVETRQITKHVAQILDSRMNTKYDENDKLIREVKVITLKSKLVSDFRKDFQFYKVREINNYHHAHDAYLNAVVGTALIKKYPKLESEFVYGDYKVYDVRKMIAKSEQEIGKATAKRFFYSNIMNFFKTEITLANGEIRKRPLIETNEETGEIVWDKGRDFATVRKVLSMPQVNIVKKTEVQTGALTNESIYARGSFDKLISRKHRFESSKYGGFGSPTVTYSVLVVAKSKVQDGKVKKIKTGKELIGITLLDKLVFEKNPLKFIEDKGYGNVQIDKCIKLPKYSLFEFENGTRRMLASVMANNNSRGDLQKANEMFLPAKLVTLLYHAHKIESSKELEHEAYILDHYNDLYQLLSYIERFASLYVDVEKNISKVKELFSNIESYSISEICSSVINLLTLTASGAPADFKFLGTTIPRKRYGSPQSILSSTLIHQSITGLYETRIDLSQLGGD

SEQ ID NO: 445 - protein, 1371 aa, Streptococcus dysgalactiae
MDKKYSIGLDIGTNSVGWAVITDDYKVPSKKFKVLGNTDRHSIKKNLIGALLFDSGETAEATRLKRTARRRYTRRKNRIRYLQEIFSSEMSKVDDSFFHRLEESFLVEEDKKHERHPIFGNIVDEVAYHEKYPTIYHLRKKLADSTDKADLRLIYLALAHMIKFRGHFLIEGDLNPDNSDMDKLFIQLVQTYNQLFEENPINASRVDAKAILSARLSKSRRLENLIAQLPGEKRNGLFGNLIALSLGLTPNFKSNFDLAEDAKLQLSKDTYDDDLDNLLAQIGDQYADLFLAAKNLSDAILLSDILRVNSEITKAPLSASMIKRYDEHHQDLTLLKALVRQQLPEKYKEIFFDQSKNGYAGYIDGGASQEEFYKFIKPILEKMDGTEELLAKLNREDLLRKQRTFDNGSIPHQIHLGELHAILRRQEDFYPFLKDNREKIEKILTFRIPYYVGPLARGNSRFAWMTRKSEETITPWNFEEVVDKGASAQSFIERMTNFDKNLPNEKVLPKHSLLYEYFTVYNELTKVKYVTEGMRKPEFLSGKQKEAIVDLLFKTNRKVTVKQLKEDYFKKIECFDSVEISGVEDRFNASLGTYHDLLKIIKDKDFLDNEENEDILEDIVLTLTLFEDKEMIEERLKKYANLFDDKVMKQLKRRHYTGWGRLSRKLINGIRDKQSGKTILDFLKSDGFANRNFMQLINDDSLTFKEAIQKAQVSGQGHSLHEQIANLAGSPAIKKGILQSVKVVDELVKVMGHKPENIVIEMARENQTTQKGQKNSRERMKRIEEGIKELGSQILKEHPVENTQLQNEKLYLYYLQNGRDMYVDQELDINRLSDYDVDHIVPQSFIKDDSIDNKILTRSDKNRGKSDNVPSEEVVKKMKNYWRQLLNAKLITQRKFDNLTKAERGGLSELDKAGFIKRQLVETRQITKHVAQILDSRMNTKYDENDKLIREVKVITLKSKLVSDFRKDFQFYKVREINNYHHAHDAYLNAVVGTALIKKYTKLESEFVYGDYKVYDVRKMIAKSEQEIGKATAKRFFYSNIMNFFKTEITLANGEIRKRPLIETNEETGEIVWDKGRDFATVRKVLSMPQVNIVKKTEVQTGALTNESIYARGSFDKLISRKHRFESSKYGGFGSPTVTYSVLVVAKSKVQDGKVKKIKTGKELIGMTLLDKLVFEKNPLKFIEDKGYGNVQIDKCIKLPKYSLFEFENGTRRMLASVMANNNSRGDLQKANEMFLPAKLVTLLYHAHKIESSKELEHEAYILDHYNDLYQLLSYIERFASLYVDVEKNISKVKELFSNIESYSISEICSSVINLLTLTASGAPADFKFLGTTIPRKRYGSPQSILSSTLIHQSITGLYETRIDLSQLGGD

SEQ ID NO: 446 - protein, 1371 aa, Streptococcus dysgalactiae
MDKKYSIGLDIGTNSVGWAVITDDYKVPSKKFKVLGNTDRHSIKKNLIGALLFDSGETAEATRLKRTARRRYTRRKNRIRYLQEIFSSEMSKVDDSFFHRLEESFLVEEDKKHERHPIFGNIVDEVAYHEKYPTIYHLRKKLADSTDKADLRLIYLALAHMIKFRGHFLIEGDLNPDNSDMDKLFIQLVQTYNQLFEENPINASRVDAKAILSARLSKSRRLENLIAQLPGEKRNGLFGNLIALSLGLTPNFKSNFDLAEDAKLQLSKDTYDDDLDNLLAQIGDQYADLFLAAKNLSDAILLSDILRVNSEITKAPLSASMIKRYDEHHQDLTLLKALVRQQLPEKYKEIFFDQSKNGYAGYIDGGASQEEFYKFIKPILEKMDGTEELLAKLNREDLLRKQRTFDNGSIPHQIHLGELHAILRRQEDFYPFLKDNREKIEKILTFRIPYYVGPLARGNSRFAWMTRKSEETITPWNFEEVVDKGASAQSFIERMTNFDKNLPNEKVLPKHSLLYEYFTVYNELTKVKYVTEGMRKPEFLSGKQKEAIVDLLFKTNRKVTVKQLKEDYFKKIECFDSVEISGVEDRFNASLGTYHDLLKIIKDKDFLDNEENEDILEDIVLTLTLFEDKEMIEERLKTYAHLFDDKVMKQLKRRHYTGWGRLSRKLINGIRDKQSGKTILDFLKSDGFANRNFIQLIHDDSLTFKEAIQKAQVSGQGHSLHEQIANLAGSPAIKKGILQSVKVVDELVKVMGHKPENIVIEMARENQTTQKGQKNSRERMKRIEEGIKELGSQILKEHPVENTQLQNEKLYLYYLQNGRDMYVDQELDINRLSDYDVDHIVPQSFIKDDSIDNKVLTRSDKNRGKSDDVPSEEVVKKMKNYWRQLLNAKLITQRKFDNLTKAERGGLSELDKAGFIKRQLVETRQITKHVAQILDSRMNTKYDENDKLIREVKVITLKSKLVSDFRKDFQFYKVREINNYHHAHDAYLNAVVGTALIKKYPKLESEFVYGDYKVYDVRKMIAKSEQEIGKATAKRFFYSNIMNFFKTEITLANGEIRKRPLIETNEETGEIVWNKGRDFATVRKVLSMPQVNIVKKTEVQTGALTNESIYARGSFDKLISRKHRFESSKYGGFGSPTVTYSVLVVAKSKVQDGKVKKIKTGKELIGITLLDKLVFEKNPLKFIEDKGYGNVQIDKCIKLPKYSLFEFENGTRRMLASVMANNNSRGDLQKANEMFLPAKLVTLLYHAHKIESSKELEHEAYILDHYNDLYQLLSYIERFASLYVDVEKNISKVKELFSNIESYSISEICSSVINLLTLTASGAPADFKFLGTTIPRKRYGSPQSILSSTLIHQSITGLYETRIDLSQLGGD

SEQ ID NO: 447 - protein, 1348 aa, Streptococcus equi
MKKPYTIALDIGTNSVGWVVVTDDYRVPTKKMKVLGNTERKTIKKNLIGALLFDSGDTAEGTRLKRTARRRYTRRKNRLRYLKEIFTEEMAKVDDGFFQRLEDSFYVLEDKEGNKHPIFANLADEVAYHKKYPTIYHLRKELVDNPQKADLRLIYLAVAHIIKFRGHFLIEGTLSSKNNNLQKSFDHLVDTYNLLFEEQRLLTEGINAKELLSAALSKSKRLENLISLIPGQKKTGIFGNIIALSLGLTPNFKANFGLSKDVKLQLAKDTYADDLDSLLAQIGDQYADLFLAAKNLSDAILLSDILTESDEITRAPLSASMVKRYREHHKDLVTLKTLIKDQLPEKYQEIFLDKTKNGYAGYIEGQVSQEEFYKYLKPILARLDGSEPLLLKIDREDFLRKQRTFDNGSIPHQIHLEELHAILRRQEVFYPFLKDNRKKIESLLTFRIPYYVGPLARGHSRFAWVKRKFDGAIRPWNFEEIVDEEASAQIFIEKMTKNDLYLPNEKVLPKHSLLYETFTVYNELTKVKYATEGMTRPQFLSADQKQAIVDLLFKTNRKVTVKQLKENYFKKIECWDSVEITGVEDSFNASLGTYHDLLKIIQDKDFLDNPDNQKIIEDIILTLTLFEDKKMISKRLDQYAHLFDKVVLNKLERHHYTGWGRLSGKLINGIRDKQSGKTILDFLKADGFANRNFMQLIHDSELSFIDEIAKAQVIGKTEYSKDLVGNLAGSPAIKKGISQTIKIVDELVKIMGYLPQQIVIEMARENQTTAQGIKNARQRMRKLEETAKKLGSNILKEHPVDNSQLQNDKRYLYYLQNGKDMYTGDDLDIDYLSSYDIDHIIPQSFIKNNSIDNKVLTSQGANRGKLDNVPSEAIVRKMKGYWQSLLRAGAISKQKFDNLTKAERGGLTQVDKAGFIQRQLVETRQITKHVAQILDSRFNTEFDDHNKRIRKVHIITLKSKLVSDFRKEFGLYKIRDINHYHHAHDAYLNAVVAKAILGKYPQLAPEFVYGDYPKYNSFKERQKATQKMLFYSNILKFFKDQESLHVNSDGEEIWNANKHLPIIKNVLSIPQVNIVKKTEVQTGGFYKESILSKGNSDKLIPRKNNWDTRKYGGFDSPTVAYSVLVIAKMEKGKAKVLKPVKEMVGITIMERTAFEENPVVFLEARGYREIQEHLIIKLPKYSLFELENGRRRLLASASELQKGNELFLPVDYMTFLYLAAHYHELTGSSEDVLRKKYFVDRHLHYFDDIIQMINDFAERHILASSNLEKINHTYHNNSDLPVNERAENIINVFTFVALGAPAAFKFFDATIDRKRYTSTKEVLNATLIHQSVTGLYETRIDLSQLGEN

SEQ ID NO: 448 - protein, 1377 aa, Streptococcus equinus
  source 1..1377: note = ATCC 9812
MEKTYSIGLDIGTNSVGWAVITDDYKVPAKKMKVLGNTDKKYIKKNLLGALLFDSGETAEATRLKRAARRRYTRRKNRLRYLQEIFAKEMAKVDESFFQRLEESFLTDDDKTFDSHPIFGNKAEEDTYHQEFPTIYHLRKHLADSPEKVDLRLVYLALAHMIKFRGHFLIEGQLNAENTDVQKIFADFVGVYDRTFDDSHLSEITVDAASILTEKISKSRRLENLIKQYPTEKKNTLFGNLVALALGLQPNFKTNFKLSEDAKLQFSKDTYDEDLEELLGKIGDDYADLFTAAKNLYDAILLSGILTVDDNSTKAPLSASMIKRYEEHHEDLEKLKTFIKVNNFDKYHEIFKDKSKNGYAGYIENGVKQDIFYKHLKSIISEKNGGQYFLDKIEREDFLRKQRTFDNGSIPYQIHLQEMRTILRRQGEYYPFLKENQAKIEKILTFRIPYYVGPLARKNSRFAWAKYHSDEPITPWNFDEVVDKEKSAEKFITRMTLNDLYLPEEKVLPKHSYVYETFAVYNELTKIKYVNEQGKSFFFDANMKQEIFDHVFKENRKVTKAKLLSYLNNEFEEFRINDLIGLDKDSKSFNASLGTYHDLKKILDKSFLDDKTNEQIIEDIVLTLTLFEDRDMIHERLQKYSDIFTSQQLKKLERRHYTGWGRLSYKLINGIRNKENNKTILDFLIDDGDANRNFMQLINDDSLSFKTTIQEAQVVGDVDDIEAVVHDLPGSPAIKKGILQSVKIVDELVKVMGHNPQNIVIEMARENQITGYGRNRSNQRLKRLQDSLKEFGSDILSKKKPSYVDSKVENSHLQNDRLFLYYIQNGKDMYTGEELDIDHLSDYDIDHIIPQAFIKDNSIDNRVLTSSAKNRGKSDDVPSIEIVRNRKSYWYKLYKSGLISKRKFDNLTKAERGGLTETDKAGFIKRQLVETRQITKHVAQILDARFNTKCDENDKVIRDVKVITLKSSLVSQFRKEFKFYKVREINDYHHAHDAYLNAVVGTALLKKYPKLAPEFVYGEYKKYDVRKLVAKSSDNHSELGKATAKYFFYSNLMNFFKTEVKYADGRVFERPDIETNADGEVVWNKQRDFNIVRKVLSYPQVNIVKKVEVQTGGFSKESILPKGDSDKLIPRKTKKLQWETQKYGGFDSPTVAYSVLVVADVEKGKTRKLKTVKELVGISIMERSSFEENPVSFLEKKGYHNVQEDKLIKLPKYSLFEFEGGRRRLLASATELQKGNEVVLPQYMVNLLYHSQHVNNSHKPEHLNYVKQHKDEFKDIFNLIISIARINILKPKVVDNLINEFTEYGQEDISSLSESFINLLKFISFGAPGAFKFLKLDVKQSNLRYKSTTEALSATLIHQSVTGLYETRIDLSKLGEE

SEQ ID NO: 449 - protein, 1370 aa, Streptococcus gallolyticus
MTKKNYSIGLDIGTNSVGWAVITDDYKVPAKKMKVLGNTDKKYIKKNLLGALLFDSGETAEATRLKRTARRRYTRRKNRLRYLQEIFAEEMTKVDESFFYRLDESFLTTDEKDFERHPIFGNKAEEDAYHQKFPTIYHLRNYLADSSEKADLRLVYLALAHMIKYRGHFLIEGKLNAENTDVQKLFTDFVGVYDRTFDDSHLSEITVDVASTLTEKISKSRRLENLIKYYPTEKKNTLFGNLIALALGLQPNFKMNFKLSEDAKLQFSKDTYEEDLEELLGKIGDDYADLFTSAKNLYDAILLSGILTVDDNSTKAPLSASMIKRYVEHHEDLEKLKEFIKANKSELYHDIFKDKNKNGYAGYIENGVKQDEFYKYLKNTLSKIDGSDYFLDKIEREDFLRKQRTFDNGSIPHQIHLQEMHAILRRQGDYYPFLKEKQDRIEKILTFRIPYYVGPLVRKDSRFAWAEYRSDEKITPWNFDKVIDKEKSAEKFITRMTLNDLYLPEEKVLPKHSHVYETYAVYNELTKIKYVNEQGKESFFDSNMKQEIFDHVFKENRKVTKEKLLNYLNKEFPEYRIKDLIGLDKENKSFNASLGTYHDLKKILDKAFLDDKVNEEVIEDIIKTLTLFEDKDMIHERLQKYSDIFTANQLKKLERRHYTGWGRLSYKLINGIRNKENNKTILDYLIDDGSANRNFMQLINDDTLPFKQIIQKSQVVGDVDDIEAVVHDLPGSPAIKKGILQSVKIVDELVKVMGDNPDNIVIEMARENQTTNRGRSQSQQRLKKLQSSLKELGSNILNEEKPSYIEDKVENSHLQNDQLFLYYIQNGKDMYTGDELDIDHLSDYDIDHIIPQAFIKDDSIDNRVLTSSAKNRGKSDDVPSLDIVRARKAEWVRLYKSGLISKRKFDNLTKAERGGLTEADKAGFIKRQLVETRQITKHVAQILDARFNTEHDENDKVIRDVKVITLKSNLVSQFRKDFEFYKVREINDYHHAHDAYLNAVVGTALLKKYPKLASEFVYGEYKKYDIRKFITNSSDKATAKYFFYSNLMNFFKTKVKYADGTVFERPIIETNADGEIAWNKQIDFEKVRKVLSYPQVNIVKKVETQTGGFSKESILPKGDSDKLIPRKTKKVYWDTKKYGGFDSPTVAYSVFVVADVEKGKAKKLKTVKELVGISIMERSFFEENPVEFLENKGYHNIREDKLIKLPKYSLFEFEGGRRRLLASASELQKGNEMVLPGYLVELLYHAHRADNFNSTEYLNYVSEHKKEFEKVLSCVEDFANLYVDVEKNLSKIRAVADSMDNFSIEEISNSFINLLTLTALGAPADFNFLGEKIPRKRYTSTKECLTATLIHQSITGLYETRIDLSKLGEE

SEQ ID NO: 450 - protein, 1370 aa, Streptococcus gallolyticus; identical to SEQ ID NO: 449
  source 1..1370: note = subsp. gallolyticus TX20005

SEQ ID NO: 451 - protein, 1371 aa, Streptococcus gallolyticus
MTEKNYSIGLDIGTNSVGWAVITDDYKVPAKKMKVLGNTDKKYIKKNLLGALLFDNGETAEATRLKRTARRRYTRRKNRLRYLQEIFAEEMAKVDESFFYRLDESFLTTDDKDFERHPIFGNKADEIKYHQEFPTIYHLRKHLADSHEKADLRLIYLALAHMIKFRGHFLIEGELNAENTDVQKLFEAFVEVYDRTFDDSNLSEITVDASSILTEKFSKSRRLENLIKHYPTEKKNTLFGNLVALALGLQPNFKTSFKLSEDAKLQFSKDTYEEDLEELIGKIGDEYADLFTSAKNLYDAILLSGILTVADNTTKAPLSASMIKRYNEHQVDLKKLKEFIKNNASDKYDEIFNDKDKNGYAGYIENGVKQDEFYKYLKTTLSKIDGSDYFLDKIEREDFLRKQRTFDNGSIPHQIHLQEMHAILRRQGEHYAFLKENQAKIEKILTFRIPYYVGPLARKNSRFAWAEYHSDEKITPWNFDEIIDKEKSAEKFITRMTLNDLYLPEEKVLPKHSLVYETYTVYNELTKVKYVNEQGKSNFFDANMKQEIFEHVFKENRKVTKDKFLNYLNKEFPEYRIQDLIGLDKENKSFNASLGTYHDLKKILDKSFLDDKTNETIIEDIIQTLTLFEDRDMIRQRLQKYSDIFTPQQLKKLERRHYTGWGRLSYKLINGIRNKENGKSILDYLIDDGYANRNFMQLISDDTLPFKQIIKDAQIIGDIDDVTSVVRELPGSPAIKKGILQSVKIVDELVKVMGHNPDNIVIEMARENQTTNRGRNQSQQRLKKLQDSLKELGSNILNEEKPSYIEGKVENNHLQDDRLFLYYIQNGKDMYTGDELDIDHLSDYDIDHIIPQAFIKDDSIDNRVLTSSAKNRGKSDDVPSLDIVHDRKADWIRLYKSGLISKRKFDNLTKAERGGLTENDKAGFIKRQLVETRQITKHVAQILDSRFNTERDENDKVIRNVKVITLKSNLVSQFRKDFKFYKVREINDYHHAHDAYLNAVVGTALLKKYPKLAPEFVYGEYKKYDIRKFITSSGDKATAKYFFYSNLMNFFKRVIRYSNGKVVVRPVIECSKDTGEIAWNKQTDFEKVRRVLSYPQVNIVKKVETQTGGFSKESILPKGNSDKLIPRKTKKFRWDTPKYGGFDSPNIAYSVFVIADVEKGKAKKLKTVKELVGISIMERSSFEENPVVFLEKKGYQNVQEDNLIKLPKYSLFEFEGGRRRLLASASELQKGNEVVLSRHLVELLYHAHRVNSFNNSEHLKYVSEHKKEFGEVLSCVENFAKSYVDVEKNLGKIRAVADKIDTFSIEDISISFVNLLTLTALGAPADFNFLGEKIPRKRYTSTKECLNATLIHQSITGLYETRIDLSKLGEE

SEQ ID NO: 452 - protein, 1130 aa, Streptococcus gallolyticus
MTNGKILGLDIGIASVGVGIIEAKTGKVVHANSRLFSAANAENNAERRGFRGSRRLNRRKKHRVKRVRDLFEKYEIVTDFRNLNLNPYELRVKGLTEQLTNEELFAALRTISKRRGISYLDDAEDDSTGSTDYAKSIDENRRLLKTKTPGQIQLERLEKYGQLRGNFTVYDENGEAHRLINVFSTSDYEKEARKILETQADYNKKITAEFIDDYVEILTQKRKYYHGPGNEKSRTDYGRFRTDGTTLENIFGILIGKCSFYPDEYRASKASYTAQEYNFLNDLNNLKVPTETGKLSTEQKEALVEFAKSTATLGPAKLLKEIAKILDCKVDEIKGYREDDKGKPDLHTFEPYRKLKFNLDSVNIDDLSREVLDKLADILTLNTEREGIEDAIRHNLPNQFTEGQISEIIKVRKSQSTAFNKGWHSFSAKLMNELIPELYATSDEQMTILTRLEKFKVNKKSSKNTKTIDEKEVTDEIYNPVVAKSVRQTIKIINAAVKKYGDFDKIVIEMPRDKNADDEKKFIDKRNKENKKEKDDALKRAAYLYNGTDKLPDEVFHGNKQLETKIRLWYQQGERCLYSGKPIPIQELVHNSNNFEIDHILPLSLSFDDSLANKVLVYAWTNQEKGQKTPYQVIDSMDAAWSFREMKDYVLKQKGLGKKKRDYLLTTENIDKIEVKKKFIERNLVDTRYASRVVLNSLQSALRELGKDTKISVIRGQFTSQLRRKWKIDKSRETYHHHAVDALIIAASSQLKLWEKQDNPMFVDYGNNQVVDKQTGEILSVSDDEYKELVFQPPYQGFVNMISSKGFEDEILFSYQVDSKYNRKVSDATIYSTRKAKIGKDKKEETYVLGKIKDIYSQNGFDTFIKKYNKDKTQFLMYQKDPLTWENVIEVILRDYPTTKKSEDGKNDVKCNPFEEYRRENGLVCKYSKKGKGTPIKSLKYYDKKLGNCIDITPEGSKNEVVLQSLNPWRADVYFNPETLKYELLGLKYSDLSFEKGTGKYHISQEKYDVIKEKEGIGKKSEFKFTLYRNDLILIKDTASGEQEIYRFLSRTMPNVKHYAELKPYDKEKFDNVQELVEALGEADKVGRCIKGLNKSNLSIYKVRTDVLGNKYFVKKEGDKPKLDFKNNKK

SEQ ID NO: 453 - protein, 1136 aa, Streptococcus gordonii
MNGLVLGLDIGIASVGVGILEKDTGKIIHASSRLFPAATADNNVERRSNRQGRRLNRRKKHRSVRLQDLFEGYGLLTDFSKVSMNLNPYQLRVQGMENQLTNEELFVALKNIVKRRGISYLDDASEDGGTVSSDYGKAVEENRKLLAEKTPGQIQLERFEKYGQLRGDFTVEENGEKHRLINVFSTSAYRKEAERILRKQQEFNSKITDEFIEDYLIILTGKRKYYHGPGNEKSRTDYGRFRTDGTTLDNIFGILIGKCTFYTEEYRASKASYTAQEFNLLNDLNNLTVPTETKKLSEEQKKLIIEYAKSAKTLGASTLLKYIAKMIDASVDQIRGYRVDVNNKPEMHTFEVYRKMQSLETIKVEELPRKVLDELAHILTLNTEREGIEEAINSKLKDIFNRDQVLELVQFRKNNSSLFSKGWHNFSIKLMMELIPELYETSEEQMTILTRLGKQRSKETSKRTKYIDEKELTEEIYNPVVAKSVRQAIKIINEATKKYGIFDNIVIEMARENNEEDAKKDYIKRQKANQDEKNAAMEKAAFQYNGKKELPDNIFHGHKELTTKIRLWHQQGEKCLYTGKNIPISDLIHNQYKYEIDHILPLSLSFDDSLSNKVLVLATANQEKGQRTPFQALDSMDDAWSYREFKSYVKDSKLLSNKKKDYLLTEEDISKIEVKQKFIERNLVDTRYSSRVVLNALQDFYKSHQLDTTISVVRGQFTSQLRRKWGIEKSRETYHHHAVDALIIAASSQLRLWKKHSNPLIAYKEGQFVDSETGEIVSLSDEEYKELVFKAPYDHFVDTLRSKKFEDSILFSYQVDSKYNRKISDATIYATRKAKLDKEKKEYTYTLGKIKDIYALGTKTPSKTGFYKFLDLYKTDKSQFLMYQKDRKTWDEVIEKIIEQYRPFKEYDKNGKEVDFNPFEKYRIGNGPIRKYSKKGNGPEIKSLKYYDILLGKHKNITPDGSRNTVALLSLNPWRTDVYYNSETKKYEFLGLKYADLCFEEGGAYGISEVKYKKIREKEGIGKNSEFKFTLYKNDLILIKDTETNCQQFFRFWSRTGKDNPKSFEKHKIELKPYEKAKFEKGEELKVLGKVPPSSNQFQKNMQIENLSIYKVKTDILGNKHFIKKEGDEPKLKFKK

SEQ ID NO: 454 - protein, 1129 aa, Streptococcus infantarius
  source 1..1129: note = subsp. infantarius ATCC BAA-102
MSNGKILGLDIGVASVGVGIIDSKTGNVIHANSRLFSAANAENNAERRGFRGARRLTRRKKHRVKRVRDLFEKYDISTDFRNLNLNPYELRVKGLTEQLTNEELFAALRTIAKRRGISYLDDAEDDSTGSSDYAKSIDENRRLLKTKTPGQIQLERLEKYGQLRGNFTVYDENGEAHRLINVFSTSDYKNEARKILETQSNYNKQITDEFIEDYIEILTQKRKYYHGPGNEKSRTDYGRFRTDGTTLENIFGILIGKCSFYPEEYRASKASYTAQEFNFLNDLNNLKVPTETGKLSTEQKEYLVDFAKKSKALGASKLLKEIAKIVDCSVDDIKGYRVDNKDKPDLHTFEPYRKLKFNLSSIDIDELSRETLDKLADILTLNTEREGIEDAIKRNLPSQFTEEQISEIVQIRKNQSSAFNKGWHSFSAKLMNELIPELYVTSEEQMTILTRLEKFKVNKKSSKNTKTIDEKEITDEIYNPVVAKSVRQTIKIINAAVKKYGDFDKIVIEMPRDKNAEDEKKFIDKKQKENKKEKDDSLKRAAFLYNGTDNLPDGVFHGNKELKTKIRLWYQQGERCLYSGKLISIHDLVHNSNKFEIDHILPLSLSFDDSLANKVLVYAWTNQEKGQKTPYQVIDSMDTAWSFREMKDYVLKQKGLGKKKCEYLLTTENIDKIEVKKKFIERNLVDTRYASRVVLNSLQTALKELGKDTKVSVVRGQFTSQLRRKWNIDKSRETYHHHAVDALIIAASSQLKLWQKQENPMFESYGENQVVNKETGEILSISDDKYKELVFQPPYQGFVNTISSKGFEDEILFSYQVDSKFNRKVSDATIYSTRKAKLGKDKKDETYVLGKIKDIYSQDGFDTFIKRYKKDKTQFLMYQKDPLTWENVIEVILRDYPSEKLSEDGKKTVKCNPFEEYRRENGLICKYSKKGNGTPIKSLKYYDKKLGNCIDITPEKSKNRVVLRQISPWRADIYFNLETLKYELMGLKYSDLSFEKGTGKYHISQEKYDAIREKEGIGKKSEFKFTLYRNDLILIKDTLNNCERMLRFGSKNDTSKHYVELKPLEKGTFDSEEEILPVLGKVAKSGQFIKGLNKPNISIYKVRTDVLGNKFFIKKEGDKPKLDFKNNNK

SEQ ID NO: 455 - protein, 1375 aa, Streptococcus infantarius
MEKSYSIGLDIGTNSVGWAVITDDYKVPAKKMKVLGNTDKKYIKKNLLGALLFDSGETAEVTRLKRTARRRYTRRKNRLRYLQEIFAKEMTKVDESFFQRLEESFLTDDDKTFDSHPIFGNKAEEDAYHQKFPTIYHLRKYLADSQEKADLRLVYLALAHMIKYRGHFLIEGELNAENTDVQKLFNVFVETYDKIVDESHLSEIEVDASSILTEKVSKSRRLENLIKQYPTEKKNTLFGNLIALALGLQPNFKTNFKLSEDAKLQFSKDTYEEDLEELLGKVGDDYADLFISAKNLYDAILLSGILTVDDNSTKAPLSASMIKRYVEHHEDLEKLKEFIKINKLKLYHDIFKDKTKNGYAGYIDNGVKQDEFYKYLKTILTKIDDSDYFLDKIERDDFLRKQRTFDNGSIPHQIHLQEMHSILRRQGDYYPFLKENQAKIEKILTFRIPYYVGPLARKDSRFAWANYHSDEPITPWNFDEVVDKEKSAEKFITRMTLNDLYLPEEKVLPKHSHVYETFTVYNELTKIKYVNEQGESFFFDANMKQEIFDHVFKENRKVTKAKLLSYLNNEFEEFRINDLIGLDKDSKSFNASLGTYHDLKKILDKSFLDDKTNGQIIEDIVLTLTLFEDRDMIHERLQKYSDFFTSQQLKKLERRHYTGWGRLSYKLINGIRNKENNKTILDFLIDDGHANRNFMQLINDESLSFKTIIQEAQVVGDVDDIEAVVHDLPGSPAIKKGILQSVKIVDELVKVMGDNPDNIVIEMARENQTTGYGRNKSNQRLKRLQDSLKEFGSDILSKKKPSYVDSKVENSHLQNDRLFLYYIQNGKDMYTGEELDIDRLSDYDIDHIIPQAFIKDNSIDNKVLTSSAKNRGKSDDVPSIEIVRNRRSYWYKLYKSGLISKRKFDNLTKAERGGLTEADKAGFIKRQLVETRQITKHVAQILDARFNTKRDENDKVIRDVKVITLKSNLVSQFRKEFKFYKVREINDYHHAHDAYLNAVVGTALLKKYPKLTPEFVYGEYKKYDVRKLIAKSSDDYSEMGKATAKYFFYSNLMNFFKTEVKYADGRVFERPDIETNADGEVVWNKQKDFDIVRKVLSYPQVNIVKKVEAQTGGFSKESILSKGDSDKLIPRKTKKVYWNTKKYGGFDSPTVAYSVLVVADIEKGKAKKLKTVKELVGISIMERSFFEENPVSFLEKKGYHNVQEDKLIKLPKYSLFEFEGGRRRLLASATELQKGNEVMLPAHLVELLYHAHRIDSFNSTEHLKYVSEHKKEFEKVLSCVENFSNLYVDVEKNLSKVRAAAESMTNFSLEEISASFINLLTLTALGAPADFNFLGEKIPRKRYTSTKECLSATLIHQSVTGLYETRIDLSKLGEE

SEQ ID NO: 456 - protein, 1368 aa, Streptococcus iniae
  source 1..1368: note = 9117
MRKPYSIGLDIGTNSVGWAVITDDYKVPSKKMRIQGTTDRTSIKKNLIGALLFDNGETAEATRLKRTTRRRYTRRKYRIKELQKIFSSEMNELDIAFFPRLSESFLVSDDKEFENHPIFGNLKDEITYHNDYPTIYHLRQTLADSDQKADLRLIYLALAHIIKFRGHFLIEGNLDSENTDVHVLFLNLVNIYNNLFEEDIVETASIDAEKILTSKTSKSRRLENLIAEIPNQKRNMLFGNLVSLALGLTPNFKTNFELLEDAKLQISKDSYEEDLDNLLAQIGDQYADLFIAAKKLSDAILLSDIITVKGASTKAPLSASMVQRYEEHQQDLALLKNLVKKQIPEKYKEIFDNKEKNGYAGYIDGKTSQEEFYKYIKPILLKLDGTEKLISKLEREDFLRKQRTFDNGSIPHQIHLNELKAIIRRQEKFYPFLKENQKKIEKLFTFKIPYYVGPLANGQSSFAWLKRQSNESITPWNFEEVVDQEASARAFIERMTNFDTYLPEEKVLPKHSPLYEMFMVYNELTKVKYQTEGMKRPVFLSSEDKEEIVNLLFKKERKVTVKQLKEEYFSKMKCFHTVTILGVEDRFNASLGTYHDLLKIFKDKAFLDDEANQDILEEIVWTLTLFEDQAMIERRLVKYADVFEKSVLKKLKKRHYTGWGRLSQKLINGIKDKQTGKTILGFLKDDGVANRNFMQLINDSSLDFAKIIKNEQEKTIKNESLEETIANLAGSPAIKKGILQSIKIVDEIVKIMGQNPDNIVIEMARENQSTMQGIKNSRQRLRKLEEVHKNTGSKILKEYNVSNTQLQSDRLYLYLLQDGKDMYTGKELDYDNLSQYDIDHIIPQSFIKDNSIDNTVLTTQASNRGKSDNVPNIETVNKMKSFWYKQLKSGAISQRKFDHLTKAERGALSDFDKAGFIKRQLVETRQITKHVAQILDSRFNSNLTEDSKSNRNVKIITLKSKMVSDFRKDFGFYKLREVNDYHHAQDAYLNAVVGTALLKKYPKLEAEFVYGDYKHYDLAKLMIQPDSSLGKATTRMFFYSNLMNFFKKEIKLADDTIFTRPQIEVNTETGEIVWDKVKDMQTIRKVMSYPQVNIVMKTEVQTGGFSKESIWPKGDSDKLIARKKSWDPKKYGGFDSPIIAYSVLVVAKIAKGKTQKLKTIKELVGIKIMEQDEFEKDPIAFLEKKGYQDIQTSSIIKLPKYSLFELENGRKRLLASAKELQKGNELALPNKYVKFLYLASHYTKFTGKEEDREKKRSYVESHLYYFDEIMQIIVEYSNRYILADSNLIKIQNLYKEKDNFSIEEQAINMLNLFTFTDLGAPSAFKFFNGDIDRKRYSSTNEIINSTLIYQSPTGLYETRIDLSKLGGK

SEQ ID NO: 457 - protein, 1338 aa, Streptococcus macacae
  source 1..1338: note = NCTC 11558
MTKPYSIGLDIGTNSVGWAVVTDGYKVPAKKMKVLGNTDKSHIKKNLLGALLFDSGNTAKDRRLKRTARRRYTRRRNRILYLQEIFAEEMAKADESFFQRLNESFLTNDDKEFDSHPIFGNKAEEEAHHHKFPTIFHLRKHLADSTEKSDLRLIYLALAHMIKFRGHFLIEGQLKAENTNVQTLFDDFVEVYDKTVEESHLSEISVSSILTEKISKSRRLENLIKYYPTEKKNTLFGNLIALSLGLQPNFKTNFKLSEDAKLQFSKDTYEEDLGELLGKIGDNYADLFISAKNLYDAILLSGILTIDDNTTKAPLSASMIKRYEEHQEDLAQLKKFIRQNLPDQYSEVFSDKTKDGYAGYIDGKTNQEAFYKYIKNMLSKTEGADYFLDKIDREDFLRKQRTFDNGSVPHQIHLQEMHAILRRQGEYYPFLKENQDKIEKILTFRIPYYVGPLARKGSRFAWAEYKADKKVTPWNFDDILDKEKSAEEFITRMTLNDLYLPEEKVLPKHSLVYETFNVYNELTKVKYVNEQGKAIFFDANMKQEIFDHVFKENRKVTKDKLLNYLNKEFEEFRIVNLTGLDKENKAFNSSLGTYHDLRKILDKSFLDDKVNEKIIEDIIQTLTLFEDREMIRQRLQKYSDIFTTQQLKKLERRHYTGWGRLSAKLINGIRDKQSNKTILGYLIDDGYSNRNFMQLINDDSLPFKEEIARAQVIGETDDLNQLVSDIAGSPAIKKGILQSLKIVDELVKVMGHNPANIVIEMARENQTTAKGRRSSQQRYKRLEEAIKNLDHDLNHKILKEHPTDNQALQNDRLFLYYLQNGRDMYTEDPLDINRLSDYDIDHIIPQSFIKDDSIDNKVLVSSAKNRGKSDNVPSEDVVNRMRPFWNKLLSCGLISQRKYSNLTKKELKPDDKAGFIKRQLVETRQITKHVAQILDARFNTKRDENKKVIRDVKIITLKSNLVSQFRKDFKFYKVREINDYHHAHDAYLNAVIGKALLDVYPQLEPEFVYGEYPHFHGYKENKATAKKFFYSNIMNFFKKDDIRTDENGEIVWKKDEHISNIKRVLSYPQVNIVKKVEIQTVGQNGGLFDDNPKSPLEVTPSKLVPLKKELNPKKYGGYQKPTTAYPVLLITDTKQLIPISVMNKKQFEQNPVKFLRDRGYQQVGKNDFIKLPKYTLVDIGDGIKRLWASSKEIHKGNQLVVSKKSQILLYHAHHLDSDLSNDYLQNHNQQFDVLFNEIISFSKKCKLGKEHIQKIENVYSNKKNSASIEELAESFIKLLGFTQLGATSPFNFLGVKLNQKQYKGKKDYILPCTEGTLIRQSITGLYETRVDLSKIGED

SEQ ID NO: 458 - protein, 1130 aa, Streptococcus macedonicus
MTNGKILGLDIGIASVGVGIIEAKTGKVVHANSRLFSAANAENNAERRGFRGSRRLNRRKKHRVKRVRDLFEKYGIVTDFRNLNLNPYELRVKGLTEQLTNEELFAALRTISKRRGISYLDDAEDDSTGSTDYAKSIDENRRLLKTKTPGQIQLERLEKYGQLRGNFTVYDENGEAHRLINVFSTSDYEKEARKILETQADYNKKITAEFIDDYVEILTQKRKYYHGPGNEKSRTDYGRFRTDGTTLENIFGILIGKCNFYPDEYRASKASYTAQEYNFLNDLNNLKVPTETGKLSTEQKESLVEFAKNTAILGPAKLLKEIAKILDCKVDEIKGYREDDKGKPDLHTFEPYRKLKFNLDSVNIDYLSREVLDKLADILTLNTEREGIEDAIKRNLPNQFTEEQISEIINVRKSQSTAFNKGWHSFSAKLMNELIPELYATSDEQMTILTRLEKFKVKKKSSKNIKTIDEKEITDEIYNPVVAKSVRQTIKIINAAVKKYGDFDKIVIEMPRDKNADDEKKFINKRNKENKKEKDDALKRAAYLYNGTDKLPDEVFHGNKQLETKIRLWYQQGERCLYSGKPIPIQELVHNSNNFEIDHILPLSLSFDDSLANKVLVYSWTNQEKGQKTPYQVIDSMDAAWSFREMKEYVLKQKGLGKKKRDYLLTTENIDKIEVKKKFIERNLVDTRYASRVVLNSLQSALRELGKDTKVSVVRGQFTSQLRRKWKIDKSRETYHHHAVDALIIAASSQLKLWEKQDNPMFVDYGNNQVVDKQTGEILSVSDNEYKELVFQPPYQGFVNTISSKGFEDEILFSYQVDSKYNRKVSDATIYSTRKAKIGKDKKEETYVLGKIKDIYSQNGFDTFVKKYNKDKTQFLMYQKDPLTWENVIEVILGDYPTTKKSEDGKNDVKCNPFEEYRRENGLICKYSKKGKGTPIKSLKYYDKKLGNCIDITPEESRNKVILQSINPWRADVYFNPETLKYELMGLKYSDLSFEKGTGNYHISQEKYDAIKEKEGIGKKSEFKFTLYRNDLILIKDIASGEQEIYRFLSRTMPNVNHYVELKPYDKEKFDNVQELVEALGEADKVGRCIKSLNKPNISIYKVRTDVLGNKYFVKKEGDKPKLDFKNNKK

SEQ ID NO: 459 - protein, 1134 aa, Streptococcus mitis
  source 1..1134: note = ATCC 6249
MNGLVLGLDIGIASEGVGILEKNSGKIIHANSRLFPAATADNNVERRKNRQARRLNRRKKHRGVRFQDLFEDYGLLTDFSKVSINLNPYRLRVDGLNQQLTNEELFIALKNIVKRRGISYLDDASEDGGAVSSDYGKAVEENRKLLAEQTPGQIQLERFEKYGQVRGDFTVVENGEKLRLINVFSTSAYKKEAERILRKQQEFNNQITDEFIEDYLKILTGKRKYYHGPGNEKSRTDYGRFRTDGTTLDNIFGILIGKCTFYPEEYRASKASYTAQEFNLLNDLNNLTVPTETKKLSEEQKKVIVEYAKEAKTLGASTLLKYIAKMIDASVDQIRGYRVDVNNKPEMHTFEVYRKMQSLETISVGELSRNVLDELAHILTLNTEREGMEEAINTKLKDSFSQDQVLELVQFRKNNSSLFSKGWHNFSLKLMMELIPELYETSEEQMTILTRLGKQKSKETSKRTKYIDEKELTEEIYNPVVAKSVRQAIKIINEATKKHGIFDNIVIEMARENNEEDAKKDYIKRQKANQDEKNAAMEKAAFQYNGKKELPDNIFHGHKELATKIRLWHQQGEKCLYTGKTIPISDLIYNQYKYEIDHILPLSLSFDDSLSNKVLALATANQEKGQRTPFQALDSMDDAWSYREFKSYVKDLKSLSNKKKDYLLTEEDISKIEVKQKFIERNLVDTRYSSRVVLNALQDFYKSHQFDTTISVVRGQFTSQLRRKWGLEKSRETYHHHAVDALIIAASSQLRLWKKQNNPLITYKEGQFVDSQTGEIISLTDDEYKELVFKAPYDHFVDTLSSKTFEDSILFSYQVDSKFNRKISDATIYATRKAKLDKEKKEYTYTLGKIKDIYSLGTKTPSKTGFYKFLDLYNKDKSQFLMFQKDRKTWDEVIEKIMEQYRPFKEYDKTGKLVDFNPFEKYRQENEPIRKYSKKGNGPEIKSLKYYDILLGKHKNITPEGSRNTVALLSLNPWRTDVYYNMETKKYEFLGLKYADLPFEEGGAYGISTETYNELREKEGIGKNSEFKFTLYKNDLILIKDTETNCQQIFRFWSRTGKDNPKSFEKHKIELKPYEKARFEKGEELEVLGKVPPSSNQLQKNMQIENLSIYKVKTDVLGNKHFIKKEGDKPKLKF

SEQ ID NO: 460 - protein, 1392 aa, Streptococcus mitis
  source 1..1392: note = SK321
MNNNNYSIGLDIGTNSVGWAVITDDYKVPSKKMKVLGNTDKHFIKKNLIGALLFDEGATAEDRRFKRTARRRYTRRKNRLRYLQEIFSEEMSKVDSSFFHRLDDSFLVPEDKRGSKYPIFATLAEEKEYHKKFPTIYHLRKHLADSKEKTDLRLIYLALAHMIKYRGHFLYEESFDIKNNDIQKIFSEFISIYDNTFEGSSLSGQNAQVEAIFTDKISKSAKRERILKLFAYEKSTDLFSEFLKLIVGNQADFKKHFDLEEKAPLQFSKDTYDEDLENLLGQIGDDFADLFLVAKKLYDAILLSGILTVTDSSTKAPLSASMIERYENHQKDLAALKQFIQNNLQEKYDEVFSDQSKDGYARYINGKTTQEAFYKYIKNLLSKFEGSDYFLDKIEREDFLRKQRTFDNGSIPHQIHLQEMNAIIRRQGEHYPFLKEYKEKIETILTFRIPYYVGPLARGNRNFAWLTRNSDQAIRPWNFEEIVDQASSAEEFINKMTNYDLYLPEEKVLPKHSLLYETFAVYNELTKVKFISEGLRDYQFLDSGQKKQIVNQLFKEKRKVTEKDIIQYLHNVDGYDGIELKGIEKQFNASLSTYHDLLKIIKDKEFMDDPKNEEILENIVHTLTIFEDREMIKQRLAQYASIFDKKVIKALTRRHYTGWGKLSAKLINGICDKKTGKTILDYLIDDGYSNRNFMQLINDDGLSFKDIIQKAQVVGKTNDVKQVVQELPGSPAIKKGILQSIKLVDELVKVMGHAPESIVIEIARENQTTARGKKNSQQRYKRIEDALKNLAPGLDSNILKEHPTDNIQLQNDRLFLYYLQNGKDMYTGEALDINQLSSYDIDHIVPQAFIKDDSLDNRVLTSSKDNRGKSDNVPSLEVVQKRKAFWQQLLDSKLISEHKFNNLTKAERGGLDERDKVGFIRRQLVETRQITKHVAQILDARFNTEVNEKDKKNRTVKIITLKSNLVSNFRKEFKLYKVREINDYHHAHDAYLNAVVAKAILKKYPKLEPGFVYGDYQKYDIKRYISRSKDPKEVEKATEKYFFYSNLLNFFKEEVHYADGTIVKRENIEYSKDTGEIAWNKEKDFATIKKVLSLPQVNIVKKTEIQTHGLDRGKPRGLFNSNPSPKPSEDRKENLVPIKQGLDPRKYGGYAGISNSYAVLVKAIIEKGAKKQQKTVLEFQGISILDKINFEKNKENYLLEKGYIKILSTITLPKYSLFEFPDGTRRRLASILSTNNKRGEIHKGNELVIPEKYTTLLYHAKNINKTLEPEHLEYVEKHRNDFAKLLEYVLNFNDKYVGALKNGERIRQAFIDWETVDIEKLCFSFIGPRNSKNAGLFELTSQGSASDFEFLGVKIPRYRDYTPSSLLNATLIHQSITGLYETRIDLSKLGED

SEQ ID NO: 461 - protein, 1345 aa, Streptococcus mutans
  source 1..1345: note = 11SSST2
MKKPYSIGLDIGTNSVGWAVVTDDYKVPAKKMKVLGNTDKSHIKKNLLGALLFDSGNTAADRRLKRTARRRYTRRRNRILYLQEIFAEEMSKVDDSFFHRLEDSFLVTEDKRGERHPIFGNLEEEVKYHENFPTIYHLRQYLADNPEKVDLRLVYLALAHIIKFRGHFLIEGKFDTRNNDVQRLFQEFLAVYDNTFENSSLQEQNVQVEEILTDKISKSAKKDRVLKLFPNEKSNGRFAEFLKLIVGNQADFKKHFELEEKAPLQFSKDTYEEELEVLLTQIGDNYAELFLSAKKLYDSILLSGILTVTDVSTKAPLSASMIQRYNEHQMDLAQLKQFIRQKLSDKYNEVFSDVSKDGYAGYIDGKTNQEAFYKYLKGLLNKIEGSGYFLDKIEREDFLRKQRTFDNGSIPHQIHLQEMRAIIRRQAEFYPFLADNQDRIEKILTFRIPYYVGPLARGKSDFAWLSRKSADKITPWNFDEIVDKESSAEAFINRMTNYDLYLPNQKVLPKHSLLYEKFTVYNELTKVKYKTEQGKTAFFDANMKQEIFDGVFKVYRKVTKDKLMDFLEKEFDEFRIVDLTGLDKENKAFNASYGTYHDLRKILDKDFLDNSKNEKILEDIVLTLTLFEDREMIRKRLENYSDLLTKEQVKKLERRHYTGWGRLSAELIHGIRNKESRKTLLDYLIDDGNSNRNFMQLINDDALSFKEEIAKAQVIGETDNLNQVVSDIAGSPAIKKGILQSLKIVDELVKIMGHQPENIVVEMARENQFTNQGRRNSQQRLKGLTDSIKEFGSQILKEHPVENSQLQNDRLFLYYLQNGRDMYTGEELDIDYLSQYDIDHIIPQAFIKDNSIDNRVLTSSKENRGKSDDVPSKDVVRKMKPYWSKLLSAKLITQRKFDNLTKAERGGLTDDDKAGFIKRQLVETRQITKHVARILDERFNTETDENNKKIRQVKIVTLKSNLVSNFRKEFELYKVREINDYHHAHDAYLNAVIGKALLGVYPQLEPEFVYGDYPHFHGHEENKATAKKFFYSNIMNFFKKDDVRTDKNGEIIWKKDEHISNIKKVLSYPQVNIVKKVEEQTGGFSKESILPKGNSDKLIPRKTKKFYWDTKKYGGFDSPIVAYSILVIADIEKGKSKKLKTVKALVGVTIMEKMTFERDPVAFLERKGYRNVQEENIIKLPKYSLFKLENGRKRLLASARELQKGNEIVLPNHLGTLLYHAKNIHKVDEPKHLDYVDKHKDEFKELLDVVSNFSKKYTLAEGNLEKIKELYAQNNGEDLKELSSSFINLLTFTAIGAPAAFKFFDKNIDRKRYTSTTEILNATLIHQSITGLYETRIDLSKLGGD

SEQ ID NO: 462 - protein, 1345 aa, Streptococcus mutans; identical to SEQ ID NO: 461
  source 1..1345: note = 11SSST2

SEQ ID NO: 463 - protein, 1345 aa, Streptococcus mutans
  source 1..1345: note = 11VS1
MKKPYSIGLDIGTNSVGWAVVTDDYKVPAKKMKVLGNTDKSHIKKNLLGALLFDSGNTAEDRRLKRTARRRYTRRRNRILYLQEIFSEEMGKVDDSFFHRLEDSFLVTEDKRGERHPIFGNLEEEVKYHENFPTIYHLRQYLADNPEKVDLRLVYLALAHIIKFRGHFLIEGKFDTRNNDVQRLFQEFLAVYDNTFENSSLQEQNVQVEEILTDKISKSAKKDRVLKLFPNEKSNGRFAEFLKLIVGNQADFKKHFELEEKAPLQFSKDTYEEELEVLLAQIGDNYAELFLSAKKLYDSILLSGILTVTDVSTKAPLSASMIQRYNEHQMDLAQLKQFIRQKLSDKYNEVFSDVSKDGYAGYIDGKTNQEAFYKYLKGLLNKIEGSGYFLDKIEREDFLRKQRTFDNGSIPHQIHLQEMRAIIRRQAEFYPFLADNQDRIEKILTFRIPYYVGPLARGKSDFAWLSRKSADKITPWNFDEIVDKESSAEAFINRMTNYDLYLPNQKVLPKHSLLYEKFTVYNELTKVKYKTEQGKTAFFDANMKQEIFDGVFKVYRKVTKDKLMDFLEKEFDEFRIVDLTGLDKENKVFNASYGTYHDLCKILDKDFLDNSKNEKILEDIVLTLTLFEDREMIRKRLENYSDLLTKEQVKKLERRHYTGWGRLSAELIHGIRNKESRKTILDYLIDDGNSNRNFMQLINDDALSFKEEIAKAQVIGETDNLNQVVSDIAGSPAIKKGILQSLKIVDELVKIMGHQPENIVVEMARENQFTKQGRRNSQQRLKGLTDSIKEFGSQILKEHPVENSQLQNDRLFLYYLQNGRDMYTGEELDIDYLSQYDIDHIIPQAFIKDNSIDNRVLTSSKENRGKSDDVPSKDVVRKMKSYWSKLLSAKLITQRKFDNLTKAERGGLTDDDKAGFIKRQLVETRQITKHVARILDERFYTETDENNKKIRQVKIVTLKSNLVSNFRKEFELYKVREINDYHHAHDAYLNAVIGKALLGVYPQLEPEFVYGDYPHFHGHKENKATAKKFFYSNIMNFFKKDDVRTDKNGEIIWKKDEHISNIKKVLSYPQVNIVKKVEEQTGGFSKESILPKGNSDKLIPRKTKKFYWDTKKYGGFDSPIVAYSILVIADIEKGKSKKLKTVKALVGVTIMEKMTFERDPVAFLERKGYRNVQEENIIKLPKYSLFKLENGRKRLLASARELQKGNEIVLPNHLGTLLYHAKNIHKVDEPKHLDYVDKHKDEFKELLDVVSNFSKKYTLAEGNLEKIKELYAQNNGEDLKELASSFINLLTFTAIGAPATFKFFDKNIDRKRYTSTTEILNATLIHQSITGLYETRIDLSKLGGD

SEQ ID NO: 464 - protein, 1345 aa, Streptococcus mutans
  source 1..1345: note = 14D
MKKPYSIGLDIGTNSVGWAVVTDDYKVPAKKMKVLGNTDKSHIKKNLLGALLFDSGNTAADRRLKRTARRRYTRRRNRILYLQEIFAEEMSKVDDSFFHRLEDSFLVTEDKRGERHPIFGNLEEEVKYHENFPTIYHLRQYLADNPEKVDLRLVYLALAHIIKFRGHFLIEGKFDTRNNDVQRLFQEFLAVYDNTFENSSLQEQNVQVEEILTDKISKSAKKDRVLKLFPNEKSNGRFAEFLKLIVGNQADFKKHFELEEKAPLQFSKDTYEEELEVLLAQIGDNYAELFLSAKKLYDSILLSGILTVTDVSTKAPLSASMIQRYNEHQMDLAQLKQFIRQKLSDKYNEVFSDVSKDGYAGYIDGKTNQEAFYKYLKGLLNKIEGSGYFLDKIEREDFLRKQRTFDNGSIPHQIHLQEMRAIIRRQAEFYPFLADNQDRIEKILTFRIPYYVGPLARGKSDFAWLSRKSADKITPWNFDEIVDKESSAEAFINRMTNYDLYLPNQKVLPKHSLLYEKFTVYNELTKVKYKTEQGKTAFFDANMKQEIFDGVFKVYRKVTKDKLMDFLEKEFDEFRIVDLTGLDKENKAFNASYGTYHDLRKILDKDFLDNSKNEKILEDIVLTLTLFEDREMIRKRLENYSDLLTKEQVKKLERRHYTGWGRLSAELIHGIRNKESRKTILDYLIDDGNSNRNFMQLINDDALSFKEEIAKAQVIGETDNLNQVVSDIAGSPAIKKGILQSLKIVDELVKIMGHQPENIVVEMARENQFTNQGRRNSQQRLKGLTDSIKEFGSQILKEHPVEHSQLQNDRLFLYYLQNGRDMYTGEELDIDYLSQYDIDHIIPQAFIKDNSIDNRVLTSSKENRGKSDDVPSKNVVRKMKSYWSKLLSAKLITQRKFDNLTKAERGGLTDDDKAGFIKRQLVETRQITKHVARILDERFHTETDENNKKIRQVKIVTLKSNLVSNFRKEFELYKVREINDYHHAHDAYLNAVIGKALLGVYPQLEPEFVYGDYPHFHGHKENKATAKKFFYSNIMNFFKKDDVRTDKNGEIIWKKDEHISNIKKVLSYPQVNIVKKVEEQTGGFSKESILPKGNSDKLIPRKTKKFYWDTKKYGGFDSPIVAYSILVIADIEKGKSKKLKTVKALVGVTIMEKMTFERDPVAFLERKGYRNVQEENIIKLPKYSLFKLENGRKRLLASARELQKGNEIVLPNHLGTLLYHAKNIHKVDEPKHLDYVDKHKDEFKELLDVVSNFSKKYTLAEGNLEKIKELYAQNNGEDLKELASSFINLLTFTAIGAPATFKFFDKNIDRKRYTSTTEILNATLIHQSITGLYETRIDLSKLGGD

SEQ ID NO: 465 - protein, 1355 aa, Streptococcus mutans
  source 1..1355: note = 15VF2
MKKSYSIGLDIGTNSVGWAVVTDDYKVPAKKMKVLGNTDKSHIKKNLLGALLFDSGNTAEDRRLKRTARRRYTRRRNRILYLQEIFSEEMGKVDDSFFHRLDESFLTDDDKNFDSHPIFGNKAEEDAYHQKFPTIYHLRKHLADSTEKADLRLVYLALAHMIKFRGHFLIEGELNAENTDVQKLFADFVGVYDRTFDDSHLSEITVDASSILTEKISKSRRLEKLINNYPKEKKNTLFGNLIALSLGLQPNFKTNFKLSEDAKLQFSKDTYEEDLEELLGKIGDDYADLFTLAKNLYDAILLSGILTADDSSTKAPLSASMIKRYAEHHEDLEKLKEFIKANKPELYHDIFKDETKNGYAGYIENGVKQDEFYKYLKNTLSKIAGSDYFLDKIEREDFLRKQRTFDNGSIPHQIHLQEMHAILRRQGDYYPFLKENQDRIEKILTFRIPYYVGPLARKNSRFAWAEYHSDEAVMPWNFDQVIDKESSAQAFIEHMTNNDLYLPNEKVLPKHSPLYEKYTVYNELTKIKYVTEIGEAKFFDANLKQEIFDGLFKHERKVTKKKLRTFLDKNFDEFRIVDIQGLDKETETFNASYATYQDLLKVIKDKVFMDNPENAEILENIVLTLTLFEDREMIKQRLAKYADVFDKKVIDQLARRHYTGWGRLSAKLLNGIRDKQSCKTIMDYLIDDAQSNRNLMQLITDDNLTFKDDIVKAQYVDNSDDLHQVVQSLAGSPAIKKGILQSLKIVDELVKVMGKEPEQIVVEMARENQTTAKGRRNSQQRYKRLKEAIKSLDRDLNHKILKEHPTDNQALQNNRLFLYYLQNGRDMYTGESLDINRLSDYDIDHVIPQAFIKDNSIDNRVLTSSKANRGKSDDVPSEDVVNRMRPFWNKLLSSGLISQRKYNNLTKKELTPDDKAGFIKRQLVETRQITKHVARMLDERFNKEFDDNNKRIRRVKIVTLKSNLVSSFRKEFELYKVREINDYHHAHDAYLNAVVVKALLVKYPKLEPEFVYGEYPKYNSYRERKTATQKMFFYSNIMNMFKSKVKLADDQIVERPMIEVNDETGEIAWDKTKHITTVKKVLSYPQVNIVKKVEEQTIGQNGGLFDDNPKSPLEVIPSKLVPLKKALNPEKYGGYQKPTTAYPILLIVDTKQLIPISVMDKKRFEQNPVKFLKDKGYQQIEKNNFVKLPKYTLVDIGNGIKRLWASSKEVHKGNQLVVSKKSQDLLYHAHHLDNDYSNEYVKNHYQQFDILFNEITSFSKKCKLGKEHIQKIEEAYSKERDSASIEELADGFIKLLGFTQLGATSPFSFLGIKLNQKQYTGKKDYLLPCMEATLIHQSITGLYETRIDLNKLGGD

SEQ ID NO: 466 - protein, 1355 aa, Streptococcus mutans; identical to SEQ ID NO: 465
  source 1..1355: note = 15VF2

SEQ ID NO: 467 - protein, 1345 aa, Streptococcus mutans
  source 1..1345: note = 1SM1
MKKPYSIGLDIGTNSVGWAVVTDDYKVPAKKMKVLGNTDKSHIKKNLLGALLFDSGNTAEDRRLKRTARRRYTRRRNRILYLQEIFSEEMGKVDDSFFHRLEDSFLVTEDKRGERHPIFGNLEEEVKYHENFPTIYHLRQYLADNPEKVDLRLVYLALAHIIKFRGHFLIEGKFDTRNNDVQRLFQEFLAVYDNTFENSSLQEQNVQVEEILTDKISKSAKKDRVLKLFPNEKSNGRFAEFLKLIVGNQADFKKHFELEEKAPLQFSKDTYEEDLEELLGKIGDDYADLFTLAKNLYDAILLSGILTADDSSTKAPLSASMIQRYNEHQMDLAQLKQFIRQKLSDKYNEVFSDVSKDGYAGYIDGKTNQEAFYKYLKGLLNKIEGSGYFLDKIEREDFLRKQRTFDNGSIPHQIHLQEMRAIIRRQAEFYPFLADNQDRIEKILTFRIPYYVGPLARGKSDFAWLSRKSADKITPWNFDEIVDKESSAEAFINRMTNYDLYLPNQKVLPKHSLLYEKFTVYNELTKVKYKTEQGKTAFFDANMKQEIFDGVFKVYRKVTKDKLMDFLEKEFDEFRIVDLTGLDKENKVFNASYGTYHDLCKILDKDFLDNSKNEKILEDIVLTLTLFEDREMIRKRLENYSDLLTKEQVKKLERRHYTGWGRLSAELIHGIRNKESRKTILDYLIDDGNSNRNFMQLINDDALSFKEEIAKAQVIGETDNLNQVVSDIAGSPAIKKGILQSLKIVDELVKIMGHQPENIVVEMARENQFTNQGRRNSQQRLKGLTDSIKEFGSQILKEHPVENSQLQNDRLFLYYLQNGRDMYTGEELDIDYLSQYDIDHIIPQAFIKDNSIDNRVLTSSKENRGKSDDVPSKDVVRKMKSYWSKLLSAKLITQRKFDNLTKAERGGLTDDDKAGFIKRQLVETRQITKHVARILDERFYTETDENNKKIRQVKIVTLKSNLVSNFRKEFELYKVREINDYHHAHDAYLNAVIGKALLGVYPQLEPEFVYGDYPHFHGHKENKATAKKFFYSNIMNFFKKDDVRTDKNGEIIWKKDEHISNIKKVLSYPQVNIVKKVEEQTGGFSKESILPKGNSDKLIPRKTKKFYWDTKKYGGFDSPIVAYSILVIADIEKGKSKKLKTVKALVGVTIMEKMTFERDPVAFLERKGYRNVQEENIIKLPKYSLFKLENGRKRLLASARELQKGNEIVLPNHLGTLLYHAKNIHKVDEPKHLDYVDKHKDEFKELLDVVSNFSKKYTLAEGNLEKIKELYAQNNGEDLKELASSFINLLTFTAIGAPATFKFFDKNIDRKRYTSTTEILNATLIHQSITGLYETRIDLSKLGGD

SEQ ID NO: 468 - protein, 1345 aa, Streptococcus mutans; identical to SEQ ID NO: 467
  source 1..1345: note = 1SM1

SEQ ID NO: 469 - protein, 1350 aa, Streptococcus mutans
  source 1..1350: note = 24
MKKPYSIGLDIGTNSVGWAVVTDDYKVPAKKMKVLGNTDKSHIEKNLLGALLFDSGNTAEDRRLKRTARRRYTRRRNRILYLQEIFSEEMGKVDDSFFHRLEDSFLVTEDKRGERHPIFGNLEEEVKYHENFPTIYHLRQYLADNPEKVDLRLVYLALAHIIKFRGHFLIEGKFDTRNNDVQRLFQEFLAVYDNTFENSSLQEQNVQVEEILTDKISKSAKKDRVLKLFPNEKSNGRFAEFLKLIVGNQADFKKHFELEEKAPLQFSKDTYEEELEVLLAQIGDNYAELFLSAKKLYDSILLSGILTVTDVSTKAPLSASMIQRYNEHQMDLTQLKQFIRQKLSDKYNEVFSDVSKDGYAGYIDGKTNQEAFYKYLKGLLNKIEGSGYFLDKIEREDFLRKQRTFDNGSIPHQIHLQEMRAIIRRQAEFYPFLADNQDRIEKILTFRIPYYVGPLARGKSDFAWLSRKSADKITPWNFDEIVDKESSAEAFINRMTNYDLYLPNQKVLPKHSLLYEKFTVYNELTKVKYKTEQGKTAFFDANMKQEIFDGVFKVYRKVTKDKLMDFLEKEFDEFRIVDLTGLDKENKAFNASYGTYHDLRKILDKDFLDNSKNEKILEDIVLTLTLFEDREMIRKRLKNYSDLLTKEQLKKLERRHYTGWGRLSAELIHGIRNKESRKTILDYLIDDGNSNRNFMQLINDDALSFKEEIAKAQVIGETDNLNQVVSDIAGSPAIKKGILQSLKIVDELVKIMGHQPENIVVEMARENQFTNQGRQNSQQRLKGLTDSIKEFGSQILKEHPVENSQLQNDRLFLYYLQNGRDMYTGEELDIDYLSQYDIDHIIPQAFIKDNSIDNRVLTSSKENRGKSDDVPSEDVVNRMRPFWNKLLSSGLISQRKYNNLTKKELTLDDKAGFIKRQLVETRQITKHVARMLDERFNKEFDDNNKRICKVKIVTLKSNLVSSFRKEFELYKVREINDYHHAHDAYLNAVVVKALLVKYSKLEPEFVYGEYPKYNSYRERKTATQKMFFYSNIMNMFKSKVKLADDQIVERPMIEVNDETGEIAWDKTKHITTVKKVLSYPQVNIVKKVEEQTIGQNGGLFDDNPKSPLEVIPSKLVPLKKALNPEKYGGYQKPTTAYPILLIVDTKQLIPISVMDKKRFEQNPVKFLKDKGYQQIEKNNFVKLPKYTLVDIGNGIKRLWASSKEVHKGNQLVVSKKSQDLLYHAHHLDNDYSNEYVKNHYQQFDILFNEITSFSKKCKLGKEHIQKIEEAYSKERDSASIEELADGFIKLLGFTQLGATSPFSFLGIKLNQKQYTGKKDYLLPCMEATLIHQSITGLYETRIDLSKLGGD

SEQ ID NO: 470 - protein, 1350 aa, Streptococcus mutans; identical to SEQ ID NO: 469
  source 1..1350: note = 24

SEQ ID NO: 471 - protein, 1345 aa, Streptococcus mutans; identical to SEQ ID NO: 464
  source 1..1345: note = 2VS1

SEQ ID NO: 472 - protein, 1345 aa, Streptococcus mutans; identical to SEQ ID NO: 464
  source 1..1345: note = 2VS1

SEQ ID NO: 473 - protein, 1345 aa, Streptococcus mutans; identical to SEQ ID NO: 463
  source 1..1345: note = 3SN1

SEQ ID NO: 474 - protein, 1345 aa, Streptococcus mutans; identical to SEQ ID NO: 463
  source 1..1345: note = 3SN1

SEQ ID NO: 475 - protein, 1345 aa, Streptococcus mutans
  source 1..1345: note = 4SM1
MKKPYSIGLDIGTNSVGWAVVTDDYKVPAKKMKVLGNTDKSHIKKNLLGALLFDSGNTAEDRRLKRTARRRYTRRRNRILYLQEIFSEEMGKVDDSFFHRLEDSFLVTEDKRGERHPIFGNLEEEVKYHENFPTIYHLRQYLADNPEKVDLRLVYLALAHIIKFRGHFLIEGKFDTRNNDVQRLFQEFLAVYDNTFENSSLQEQNVQVEEILTDKISKSAKKDRVLKLFPNEKSNGRFAEFLKLIVGNQADFKKHFELEEKAPLQFSKDTYEEDLEELLGKIGDDYADLFTLAKNLYDAILLSGILTADDSSTKAPLSASMIQRYNEHQMDLAQLKQFIRQKLSDKYNEVFSDVSKDGYAGYIDGKTNQEAFYKYLKGLLNKIEGSGYFLDKIEREDFLRKQRTFDNGSIPHQIHLQEMRAIIRRQAEFYPFLADNQDRIEKILTFRIPYYVGPLARGKSDFAWLSRKSADKITPWNFDEIVDKESSAEAFINRMTNYDLYLPNQKVLPKHSLLYEKFTVYNELTKVKYKTEQGKTAFFDANMKQEIFDGVFKVYRKVTKDKLMDFLEKEFDEFRIVDLTGLDKENKVFNASYGTYHDLCKILDKDFLDNSKNEKILEDIVLTLTLFEDREMIRKRLENYSDLLTKEQVKKLERRHYTGWGRLSAELIHGIRNKESRKTILDYLIDDGNSNRNFMQLINDDALSFKEEIAKAQVIGETDNLNQVVSDIAGSPAIKKGILQSLKIVDELVKIMGHQPENIVVEMARENQFTNQGRRNSQQRLKGLTDSIKEFGSQILKEHPVENSQLQNDRLFLYYLQNGRDMYTGEELDIDYLSQYDIDHIIPQAFIKDNSIDNRVLTSSKENRGKSDDVPSKDVVRKMKPYWSKLLSAKLITQRKFDNLTKAERGGLTDDDKAGFIKRQLVETRQITKHVARILDERFNTETDENNKKIRQVKIVTLKSNLVSNFRKEFELYKVREINDYHHAHDAYLNAVIGKALLGVYPQLEPEFVYGDYPHFHGHEENKATAKKFFYSNIMNFFKKDDVRTDKNGEIIWKKDEHISNIKKVLSYPQVNIVKKVEEQTGGFSKESILPKGNSDKLIPRKTKKFYWDTKKYGGFDSPIVAYSILVIADIEKGKSKKLKTVKALVGVTIMEKMTFERDPVAFLERKGYRNVQEENIIKLPKYSLFKLENGRKRLLASARELQKGNEIVLPNHLGTLLYHAKNIHKVDEPKHLDYVDKHKDEFKELLDVVSNFSKKYTLAEGNLEKIKELYAQNNGEDLKELASSFINLLTFTAIGAPATFKFFDKNIDRKRYTSTTEILNATLIHQSITGLYETRIDLSKLGGD

SEQ ID NO: 476 - protein, 1345 aa, Streptococcus mutans; identical to SEQ ID NO: 475
  source 1..1345: note = 4SM1

SEQ ID NO: 477 - protein, 1345 aa, Streptococcus mutans
  source 1..1345: note = 4VF1
MKKPYSIGLDIGTNSVGWAVVTDDYKVPAKKMKVLGNTDKSHIKKNLLGALLFDSGNTAEDRRLKRTARRRYTRRRNRILYLQEIFSEEMGKVDDSFFHRLEDSFLVTEDKRGERHPIFGNLEEEVKYHENFPTIYHLRQYLADNPEKVDLRLVYLALAHIIKFRGHFLIEGKFDTRNNDVQRLFQEFLAVYDNTFENSSLQEQNVQVEEILTDKISKSAKKDRVLKLFPNEKSNGRFAEFLKLIVGNQADFKKHFELEEKAPLQFSKDTYEEELEVLLAQIGDNYAELFLSAKKLYDSILLSGILTVTDVSTKAPLSASMIQRYNEHQMDLAQLKQFIRQKLSDKYNEVFSDVSKDGYAGYIDGKTNQEAFYKYLKGLLNKIEGSGYFLDKIEREDFLRKQRTFDNGSIPHQIHLQEMRAIIRRQAEFYPFLADNQDRIEKILTFRIPYYVGPLARGKSDFAWLSRKSADKITPWNFDEIVDKESSAEAFINRMTNYDLYLPNQKVLPKHSLLYEKFTVYNELTKVKYKTEQGKTAFFDANMKQEIFDGVFKVYRKVTKDKLMDFLEKEFDEFRIVDLTGLDKENKVFNASYGTYHDLCKILDKDFLDNSKNEKILEDIVLTLTLFEDREMIRKRLENYSDLLTKEQVKKLERRHYTGWGRLSAELIHGIRNKESRKTILDYLIDDGNSNRNFMQLINDDALSFKEEIAKAQVIGETDNLNQVVSDIAGSPAIKKGILQSLKIVDELVKIMGHQPENIVVEMARENQFTKQGRRNSQQRLKGLTDSIKEFGSQILKEHPVENSQLQNDRLFLYYLQNGRDMYTGEELDIDYLSQYDIDHIIPQAFIKDNSIDNRVLTSSKENRGKSDDVPSKDVVRKMKSYWSKLLSAKLITQRKFDNLTKAERGGLTDDDKAGFIKRQLVETRQITKHVARILDERFYTETDENNKKIRQVKIVTLKSNLVSNFRKEFELYKVREINDYHHAHDAYLNAVIGKALLGVYPQLEPEFVYGDYPHFHGHKENKATAKKFFYSNIMNFFKKDDVRTDRNGEIIWKKDEHISNIKKVLSYPQVNIVKKVEEQTGGFSKESILPKGNSDKLIPRKTKKFYWDTKKYGGFDSPIVAYSILVIADIEKGKSKKLKTVKALVGVTIMEKMTFERDPVAFLERKGYRNVQEENIIKLPKYSLFKLENGRKRLLASARELQKGNEIVLPNHLGTLLYHAKNIHKVDEPKHLDYVDKHKDEFKELLDVVSNFSKKYTLAEGNLEKIKELYAQNNGEDLKELASSFINLLTFTAIGAPATFKFFDKNIDRKRYTSTTEILNATLIHQSITGLYETRIDLSKLGGD

SEQ ID NO: 478 - protein, 1345 aa, Streptococcus mutans; identical to SEQ ID NO: 477
  source 1..1345: note = 4VF1

SEQ ID NO: 479 - protein, 1345 aa, Streptococcus mutans
  source 1..1345: note = 5SM3
MKKPYSIGLDIGTNSVGWAVVTDDYKVPAKKMKVLGNTDKSHIEKNLLGALLFDSGNTAEDRRLKRTARRRYTRRRNRILYLQEIFSEEMGKVDDSFFHRLEDFFLVTEDKRGERHPIFGNLEEEVKYHENFPTIYHLRQYLADNPEKVDLRLVYLALAHIIKFRGHFLIEGKFDTRNNDVQRLFQEFLAVYDNTFENSSLQEQNVQVEEILTDKISKSAKKDRVLKLFPNEKSNGRFAEFLKLIVGNQADFKKHFELEEKAPLQFSKDTYEEELEVLLAQIGDNYAELFLSAKKLYDSILLSGILTADDSSTKAPLSASMIQRYNEHQMDLAQLKQFIRQKLSDKYNEVFSDVSKDGYAGYIDGKTNQEAFYKYLKGLLNKIEGSGYFLDKIEREDFLRKQRTFDNGSIPHQIHLQEMRAIIRRQSEFYPFLADNQDRIEKILTFRIPYYVGPLARGKSDFAWLSRKSADKITPWNFDEIVDKESSAEAFINRMTNYDLYLPNQKVLPKHSLLYEKFTVYNELTKVKYKTEQGETAFFDANMKQEIFDGVFKVYRKVTKDKLMDFLEKEFDEFRIVDLTGLDKENKAFNASYGTYHDLRKILDKDFLDNSKNEKILEDIVLTLTLFEDREMIRKRLKNYSDLLTKEQLKKLERRHYTGWGRLSAELIHGIRNKESRKTILDYLIDDGNSNRNFMQLINDDALSFKEEIAKAQVIGETDNLNQVVSDIAGSPAIKKGILQSLKIVDELVKIMGHQPENIVVEMARENQFTNQGRRNSQQRLKGLTDSIKEFGSQILKEHPVENSQLQNDRLFLYYLQNGRDMYTGEELDIDYLSQYDIDHIIPQAFIKDNSIDNRVLTSSKENRGKSDDVPSKDVVRKMKPYWSKLLSAKLITQRKFDNLTKAERGGLTDDDKAGFIKRQLVETRQITKHVARILDERFNTETDENNKKIRQVKIVTLKSNLVSNFRKEFELYKVREINDYHHAHDAYLNAVIGKALLGVYPQLEPEFVYGDYPHFHGHEENKATAKKFFYSNIMNFFKKDDVRTDKNGEIIWKKDEHISNIKKVLSYPQVNIVKKVEEQTGGFSKESILPKGNSDKLIPRKTKKFYWDTKKYGGFDSPIVAYSILVIADIEKGKSKKLKTVKALVGVTIMEKMTFERDPVAFLERKGYRNVQEENIIKLPKYSLFKLENGRKRLLASARELQKGNEIVLPNHLGTLLYHAKNIHKVDEPKHLDYVDKHKDEFKELLDVVSNFSKKYTLAEGNLEKIKELYAQNNGEDLKELASSFINLLTFTAIGAPATFKFFDKNIDRKRYTSTTEILNATLIHQSITGLYETRIDLSKLGGD

SEQ ID NO: 480 - protein, 1345 aa, Streptococcus mutans; identical to SEQ ID NO: 479
  source 1..1345: note = 5SM3

SEQ ID NO: 481 - protein, 1359 aa, Streptococcus mutans
  source 1..1359: note = 66-2A
MKKPYSIGLDIGTNSVGWAVVTDDYKVPAKKMKVLGNTDKSHIKKNLLGALLFDSGNTAEDRRLKRTARRRYTRRRNRILYLQEIFAEEMMQVDESFFQRLDDSFLVEEDKRGSRYPIFGTLKEEKKYHKEFKTIYHLREKLANSTEKADLRLVYLSLAHMIKFRGHFLIEGQLKAENTNVQALFKDFVEVYDKTVEESHLSEMTVDALSILTEKVSKSRRLENLVECYPTEKKNTLFGNLIALSLGLQPNFKTNFQLSEDAKLQFSKDTYEEDLEGLLGEIGDEYADLFASAKNLYDAILLSGILAVDDNTTKAPLSASMVKRYKEHKEELAAFKRFIKEKLPKKYEEIFKDDTKNGYAGYVGADKKLRKRSGKLATEEEFYKYVKGILNKVEGADVWLDKIDREDFLRKQRTFDNGSIPHQIHLQEMHAILRRQGEHYPFLKENQDKIEKILTFRIPYYVGPLVRKGSRFAWAEYKADEKITPWNFDDILDKEKSAEKFITRMTLNDLYLPEEKVLPKHSLLYETFTVYNELTKVKYVNEQGEAKFFDANMKQEIFDHVFKENRKVTKDKLLNYLNKEFEEFRIVNLTGLDKENKVFNSSLGTYHDLRKILNKSFLDNKENEQIIEDIIQTLTLFEDREMIRQRLQKYSDIFTKAQLKKLERRHYTGWGRLSYKLINGIRDKQSNKTILGYLIDDGYSNRNFMQLINDDALSFKEEIAKAQVIGEMDGLNQVVSDIAGSPAIKKGILQSLKIVDELVKVMGHNPANIVIEMARENQTTAKGRRSSQKRYKRLEEAIKNLDHDLNHKILKEHPTDNQALQNDRLFLYYLQNGRDMYTEDPLDINRLSDYDIDHIIPQAFIKDNSIDNRVLTRSDKNRGKSDDVPSEEVVHKMKPFWSKLLSAKLITQRKFDNLTKAERGGLTDDDKAGFIKRQLVETRQITKHVARILDERFNTETDENNKKIRQVKIVTLKSNLVSNFRKEFELYKVREINDYHHAHDAYLNAVIGKALLGVYPQLEPEFVYGDYPHFHGHKENKATAKKFFYSNIMNFFKKGDVRTDKNGEIIWKKDEHISNIKKVLSYPQVNIVKKVEEQTGGFSKESILPKGNSDKLIPRKTKKFYWDTKKYGGFDSPIVAYSILVIADIEKGKSKKLKTVKALVGVTIMEKMTFERDPVAFLERKGYRNVQEENIIKLPKYSLFKLENGRKRLLASARELQKGNEIVLPNHLETLLYHAKNIHKVDEPKHLDYVDKHKDEFKELLDVVSNFSKKYTLAEGNLEKIKELYAQNNGEDLKELASSFINLLTFTAIGAPAAFKFFDKNIDRKRYTSTTEILNATLIHQSITGLYETRIDLNKLGGD

SEQ ID NO: 482 - protein, 1359 aa, Streptococcus mutans; identical to SEQ ID NO: 481
  source 1..1359: note = 66-2A

SEQ ID NO: 483 - protein, 1345 aa, Streptococcus mutans
  source 1..1345: note = 8ID3
MKKPYSIGLDIGTNSVGWAVVTDDYKVPAKKMKVLGNTDKSHIEKNLLGALLFDSGNTAEDRRLKRTARRRYTRRRNRILYLQEIFSEEMGKVDDSFFHRLEDSFLVTEDKRGERHPIFGNLEEEVKYHENFPTIYHLRQYLADNPEKVDLRLVYLALAHIIKFRGHFLIEGKFDTRNNDVQRLFQEFLAVYDNTFENSSLQEQNVQVEEILTDKISKSAKKDRVLKLFPNEKSNGRFAEFLKLIVGNQADFKKHFELEEKAPLQFSKDTYEEELEVLLAQIGDNYAELFLSAKKLYDSILLSGILTVTDVGTKAPLSASMIQRYNEHQMDLAQLKQFIRQKLSDKYNEVFSDVSKDGYAGYIDGKTNQEAFYKYLKGLLNKIEGSGYFLDKIEREDFLRKQRTFDNGSIPHQIHLQEMRAIIRRQAEFYPFLADNQDRIEKLLTFRIPYYVGPLARGKSDFAWLSRKSADKITPWNFDEIVDKESSAEAFINRMTNYDLYLPNQKVLPKHSLLYEKFTVYNELIKVKYKTEQGKTAFFDANMKQEIFDGVFKVYRKVTKDKLMDFLEKEFDEFRIVDLTGLDKENKVFNASYGTYHDLCKILDKDFLDNSKNEKILEDIVLTLTLFEDREMIRKRLENYSDLLTKEQVKKLERRHYTGWGRLSAELIHGIRNKESRKTILDYLIDDGNSNRNFMQLINDDALSFKEEIAKAQVIGETDNLNQVVSDIAGSPAIKKGILQSLKIVDELVKIMGHQPENIVVEMARENQFTNQGRRNSQQRLKGLTDSIKEFGSQILKEHPVENSQLQNDRLFLYYLQNGRDMYTGEELDIDYLSQYDIDHIIPQAFIKDNSIDNRVLTSSKENRGKSDDVPSKDVVRKMKSYWSKLLSAKLITQRKFDNLTKAERGGLTDDDKAGFIKRQLVETRQITKHVARILDERFNTETDENNKKIRQVKIVTLKSNLVSNFRKEFELYKVREINDYHHAHDAYLNAVIGKALLGVYPQLEPEFVYGDYPHFHGHKENKATAKKFFYSNIMNFFKKDDVRTDKNGEIIWKKDEHISNIKKVLSYPQVNIVKKVEEQTGGFSKESILPKGNSDKLIPRKTKKFYWDTKKYGGFDSPIVAYSILVIADIEKGKSKKLKTVKALVGVTIMEKMTFERDPVAFLERKGYRNVQEENIIKLPKYSLFKLENGRKRLLASARELQKGNEIVLPNHLGTLLYHAKNIHKVDEPKHLDYVDKHKDEFKELLDVVSNFSKKYTLAEGNLEKIKELYAQNNGEDLKELASSFINLLTFTAIGAPATFKFFDKNIDRKRYTSTTEILNATLIHQSITGLYETRIDLNKLGGD

SEQ ID NO: 484 - protein, 1345 aa, Streptococcus mutans; identical to SEQ ID NO: 483
  source 1..1345: note = 8ID3

SEQ ID NO: 485 - protein, 1345 aa, Streptococcus mutans
  source 1..1345: note = A19
MKKPYSIGLDIGTNSVGWSVVTDDYKVPAKKMKVLGNTDKSHIEKNLLGALLFDSGNTAEDRRLKRTARRRYTRRRNRILYLQEIFSEEMGKVDDSFFHRLEDSFLVTEDKRGERHPIFGNLEEEVKYHENFPTIYHLRQYLADNPEKVDLRLVYLALAHIIKFRGHFLIEGKFDTRNNDVQRLFQEFLAVYDNTFENSSLQEQNVQVEEILTDKISKSAKKDRVLKLFPNEKSNGRFAEFLKLIVGNQADFKKHFELEEKAPLQFSKDTYEEELEVLLAQIGDNYAELFLSAKKLYDSILLSGILTVTDVGTKAPLSASMIQRYNEHQMDLAQLKQFIRQKLSDKYNEVFSDVSKDGYAGYIDGKTNQEAFYKYLKGLLNKIEGSGYFLDKIEREDFLRKQRTFDNGSIPHQIHLQEMRAIIRRQAEFYPFLADNQDRIEKLLTFRIPYYVGPLARGKSDFAWLSRKSADKITPWNFDEIVDKESSAEAFINRMTNYDLYLPNQKVLPKHSLLYEKFTVYNELTKVKYKTEQGKTAFFDANMKQEIFDGVFKVYRKVTKDKLMDFLEKEFDEFRIVDLTGLDKENKVFNASYGTYHDLCKILDKDFLDNSKNEKILEDIVLTLTLFEDREMIRKRLENYSDLLTKEQVKKLERRHYTGWGRLSAELIHGIRNKESRKTILDYLIDDGNSNRNFMQLINDDALSFKEEIAKAQVIGETDNLNQVVSDIAGSPAIKKGILQSLKIVDELVKIMGHQPENIVVEMARENQFTNQGRRNSQQRLKGLTDSIKEFGSQILKEHPVENSQLQNDRLFLYYLQNGRDMYTGEELDIDYLSQYDIDHIIPQAFIKDNSIDNRVLTSSKENRGKSDDVPSKDVVRKMKSYWSKLLSAKLITQRKFDNLTKAERGGLTDDDKAGFIKRQLVETRQITKHVARILDERFNTETDENNKKIRQVKIVTLKSNLVSNFRKEFELYKVREINDYHHAHDAYLNAVIGKALLGVYPQLEPEFVYGDYPHFHGHKENKATAKKFFYSNIMNFFKKDDVRIDKNGEIIWKKDEHISNIKKVLSYPQVNIVKKVEEQTGGFSKESILPKGNSDKLIPRKTKKFYWDTKKYGGFDSPIVAYSILVIADIEKGKSKKLKTVKALVGVTIMEKMTFERDPVAFLERKGYRNVQEENIIKLPKYSLFKLENGRKRLLASARELQKGNEIVLPNHLGTLLYHAKNIHKVDEPKHLDYVDKHKDEFKELLDVVSNFSKKYTLAEGNLEKIKELYAQNNGEDLKELASSFINLLTFTAIGAPATFKFFDKNIDRKRYTSTTEILNATLIHQSITGLYETRIDLSKLGGD

SEQ ID NO: 486 - protein, 1345 aa, Streptococcus mutans; identical to SEQ ID NO: 485
  source 1..1345: note = A19

SEQ ID NO: 487 - protein, 1345 aa, Streptococcus mutans; identical to SEQ ID NO: 464
  source 1..1345: note = B

SEQ ID NO: 488 - protein, 1345 aa, Streptococcus mutans; identical to SEQ ID NO: 464
  source 1..1345: note = G123

SEQ ID NO: 489 - protein, 1345 aa, Streptococcus mutans
MKKPYSIGLDIGTNSVGWAVVTDDYKVPAKKMKVLGNTDKSHIKKNLLGALLFDSGNTAEDRRLKRTARRRYTRRRNRILYLQEIFSEEMGKVDDSFFHRLDESFLTDDDKNFDSHPIFGNKAEEDAYHQKFPTIYHLRKHLADSTEKADLRLVYLALAHMIKFRGHFLIEGELNAENTDVQKLFADFVGVYDRTFDDSHLSEITVDASSILTEKISKSRRLEKLINNYPKEKKNTLFGNLIALSLGLQPNFKTNFKLSEDAKLQFSKDTYEEELEVLLAQIGDNYAELFLSAKKLYDSILLSGILTVTDVSTKAPLSASMIQRYNEHQMDLAQLKQFIRQKLSDKYNEVFSDVSKDGYAGYIDGKTNQEAFYKYLKGLLNKIEGSGYFLDKIEREDFLRKQRTFDNGSIPHQIHLQEMRAIIRRQAEFYPFLADNQDRIEKILTFRIPYYVGPLARGKSDFAWLSRKSADKITPWNFDEIVDKESSVEAFINRMTNYDLYLPNQKVLPKHSLLYEKFTVYNELTKVKYKTEQGKTAFFDANMKQEIFDGVFKVYRKVTKDKLMDFLEKEFDEFRIVDLTGLDKENKAFNASYGTYHDLRKILDKDFLDNSKNEKILEDIVLTLTLFEDREMIRKRLKNYSDLLTKEQLKKLERRHYTGWGRLSAELIHGIRNKESRKTILDYLIDDGNSNRNFMQLINDDALSFKEEIAKAQVIGETDNLNQVVSDIAGSPAIKKGILQSLKIVDELVKIMGHQPENIVVEMARENQFTNQGRRNSQQRLKGLTDSIKEFGSQILKEHPVENSQLQNDRLFLYYLQNGRDMYTGEELDIDYLSQYDIDHIIPQAFIKDNSIDNRVLTSSKENRGKSDDVPSKDVVRKMKSYWSKLLSAKLITQRKFDNLTKGERGGLTDDDKAGFIKRQLVETRQITKHVARILDERFNTETDENNKKIRQVKIVTLKSNLVSNFRKEFELYKVREINDYHHAHDAYLNAVIGKALLGVYPQLEPEFVYGDYPHFHGHKENKATAKKFFYSNIMNFFKKDDVRTDKNGEIIWKKDEYISNIKKVLSYPQVNIVKKVEEQTGGFSKESILPKGDSDKLIPRKTKKFYWDTKKYGGFDSPIVAYSILVIADIEKGKSKKLKTVKALVGVTIMEKMTFERDPVAFLERKGYRNVQEENIIKLPKYSLFKLENGRKRLLASARELQKGNEIVLPNHLGTLLYHAKNIHKVDEPKHLDYVDKHKDEFKELLDVVSNFSKKYTLAEGNLEKIKELYAQNNGEDLKELASSFINLLTFTAIGAPATFKFFDKNIDRKRYTSTTEILNATLIHQSITGLYETRIDLSKLGGD

SEQ ID NO: 490 - protein, 1345 aa, Streptococcus mutans
MKKPYSIGLDIGTNSVGWAVVTDDYKVPDKKMKVLGNTDKSHIKKNLLGALLFDSGNTAEDRRLKRTARRRYTRRRNRILYLQEIFSEEMGKVDDSFFHRLEDSFLVTEDKRGERHPIFGNLEEEVKYHENFPTIYHLRQYLADNPEKTDLRLVYLALAHIIKFRGHFLIEGKFDTRNNDVQRLFQEFLAVYDNTFENSSLQEQNVQVEEILTDKISKSAKKDRVLKLFPNEKSNGRFAEFLKLIVGNQADFKKHFELEEKAPLQFSKDIYEEELEVLLAQIGDNYAELFLSAKKLYDSILLSGILTVTDVSTKAPLSASMIQRYNEHQMDLAQLKQFIRQKLSDKYNEVFSDVSKDGYAGYIDGKTNQEAFYKYLKGLLNKIEGSGYFLDKIEREDFLRKQRTFDNGSIPHQIHLQEMRAIIRRQAEFYPFLADNQDRIEKILTFRIPYYVGPLARGKSDFAWLSRKSADKITPWNFDEIVDKESSVEAFINRMTNYDLYLPNQKVLPKHSLLYEKFTVYNELTKVKYKTEQGKTAFFDANMKQEIFDGVFKVYRKVTKDKLMDFLEKEFDEFRIVDLTGLDKENKAFNASYGTYHDLRKILDKDFLDNSKNEKILEDIVLTLTLFEDREMIRKRLKNYSDLLTKEQLKKLERRHYTGWGRLSAELIHGIRNKESRKTILDYLIDDGNSNRNFMQLINDDALSFKEEIAKAQVIGETDNLNQVVSDIAGSPAIKKGILQSLKIVDELVKIMGHQPENIVVEMARENQFTNQGRRNSQQRLKGLTDSIKEFGSQILKEHPVENSQLQNDRLFLYYLQNGRDMYTGEELDIDYLSQYDIDHIIPQAFIKDNSIDNRVLTSSKENRGKSDDVPSKDVVRKMKSYWSKLLSAKLITQRKFDNLTKAERGGLTDDDKAGFIKRQLVETRQITKHVARILDERFYTETDENNKKIRQVKIVTLKSNLVSNFRKEFELYKVREINDYHHAHDAYLNAVIGKALLGVYPQLEPEFVYGDYPHFHGHKENKATAKKFFYSNIMNFFKKDDVRTDKNGEIIWKKDEHISNIKKVLSYPQVNIVKKVEEQTGGFSKESILPKGNSDKLIPRKTKKFYWDTKKYGGFDSPIVAYSILVIADIEKGKSKKLKTVKALVGVTIMEKMTFERDPVAFLERKGYRNVQEENIIKLPKYSLFKLENGRKRLLASARELQKGNEIVLPNHLGTLLYHAKNIHKVDEPKHLDYVDKHKDEFKELLDVVSNFSKKYTLAEGNLEKIKELYAQNNGEDLKELASSFINLLTFTAIGAPATFKFFDKNIDRKRYTSTTEILNATLIHQSITGLYETRIDLSKLGGD

SEQ ID NO: 491 - protein, 1345 aa, Streptococcus mutans
  source 1..1345: note = M21
MKKPYSIGLDIGTNSVGWAVVTDDYKVPAKKMKVLGNTDKSHIKKNLLGALLFDSGNTAEDRRLKRTARRRYTRRRNRILYLQEIFSEEMGKVDDSFFHRLEDSFLVTEDKRGERHPIFGNLEEEVKYHENFPTIYHLRQYLADNPEKTDLRLVYLALAHIIKFRGHFLIEGKFDTRNNDVQRLFQEFLAVYDNTFENSSLQEQNVQVEEILTDKISKSAKKDRVLKLFPNEKSNGRFAEFLKLIVGNQADFKKHFELEEKAPLQFSKDIYEEELEVLLAQIGDNYAELFLSAKKLYDSILLSGILTVTDVSTKAPLSASMIQRYNEHQMDLAQLKQFIRQKLSDKYNEVFSDVSKDGYAGYIDGKTNQEAFYKYLKGLLNKIEGSGYFLDKIEREDFLRKQRTFDNGSIPHQIHLQEMRAIIRRQAEFYPFLADNQDRIEKILTFRIPYYVGPLARGKSDFAWLSRKSADKITPWNFDEIVDKESSVEAFINRMTNYDLYLPNQKVLPKHSLLYEKFTVYNELTKVKYKTEQGKTAFFDANMKQEIFDGVFKVYRKVTKDKLMDFLEKEFDEFRIVDLTGLDKENKAFNASYGTYHDLRKILDKDFLDNSKNEKILEDIVLTLTLFEDREMIRKRLKNYSDLLTKEQLKKLERRHYTGWGRLSAELIHGIRNKESRKTILDYLIDDGNSNRNFMQLINDDALSFKEEIAKAQVIGETDNLNQVVSDIAGSPAIKKGILQSLKIVDELVKIMGHQPENIVVEMARENQFTNQGRRNSQQRLKGLTDSIKEFGSQILKEHPVENSQLQNDRLFLYYLQNGRDMYTGEELDIDYLSQYDIDHIIPQAFIKDNSIDNRVLTSSKENRGKSDDVPSKNVVRKMKSYWSKLLSAKLITQRKFDNLTKAERGGLTDDDKAGFIKRQLVETRQITKHVARILDERFHTETDENNKKIRQVKIVTLKSNLVSNFRKEFELYKVREINDYHHAHDAYLNAVIGKALLGVYPQLEPEFVYGDYPHFHGHKENKATAKKFFYSNIMNFFKKDDVRTDKNGEIIWKKDEHISNIKKVLSYPQVNIVKKVEEQTGGFSKESILPKGNSDKLIPRKTKKFYWDTKKYGGFDSPIVAYSILVIADIEKGKSKKLKTVKALVGVTIMEKMTFERDPVAFLERKGYRNVQEENIIKLPKYSLFKLENGRKRLLASARELQKGNEIVLPNHLGTLLYHAKNIHKVDEPKHLDYVDKHKDEFKELLDVVSNFSKKYTLAEGNLEKIKELYAQNNGEDLKELASSFINLLTFTAIGAPATFKFFDKNIDRKRYTSTTEILNATLIHQSITGLYETRIDLSKLGGD

SEQ ID NO: 492 - protein, 1345 aa, Streptococcus mutans; identical to SEQ ID NO: 491
  source 1..1345: note = M21

SEQ ID NO: 493 - protein, 1345 aa, Streptococcus mutans
  source 1..1345: note = M230
MKKPYSIGLDIGTNSVGWAVVTDDYKVPAKKMKVLGNTDKSHIKKNLLGALLFDSGNTAEDRRLKRTARRRYTRRRNRILYLQEIFSEEMGKVDDSFFHRLEDSFLVTEDKRGERHPIFGNLEEEVKYHENFPTIYHLRQYLADNPEKVDLRLVYLALAHIIKFRGHFLIEGKFDTRNNDVQRLFQEFLAVYDNTFENSSLQEQNVQVEEILTDKISKSAKKDRVLKLFPNEKSNGRFAEFLKLIVGNQADFKKHFELEEKAPLQFSKDTYEEELEVLLAQIGDNYAELFLSAKKLYDSILLSGILTVTDVSTKAPLSASMIQRYNEHQMDLAQLKQFIRQKLSDKYNEVFSDVSKDGYAGYIDGKTNQEAFYKYLKGLLNKIEGSGYFLDKIEREDFLRKQRTFDNGSIPHQIHLQEMRAIIRRQAEFYPFLADNQDRIEKILTFRIPYYVGPLARGKSDFAWLSRKSADKITPWNFDEIVDKESSAEAFINRMTNYDLYLPNQKVLPKHSLLYEKFTVYNELTKVKYKTEQGKTAFFDANMKQEIFDGVFKVYRKVTKDKLMDFLEKEFDEFRIVDLTGLDKENKVFNASYGTYHDLCKILDKDFLDNSKNEKILEDIVLTLTLFEDREMIRKRLENYSDLLTKEQVKKLERRHYTGWGRLSAELIHGIRNKESRKTILDYLIDDGNSNRNFMQLINDDALSFKEEIAKAQVIGETDNLNQVVSDIAGSPAIKKGILQSLKIVDELVKIMGHQPENIVVEMARENQFTNQGRQNSQQRLKGLTDSIKEFGSQILKEHPVENSQLQNDRLFLYYLQNGRDMYTGEELDIDYLSQYDIDHIIPQAFIKDNSIDNRVLTSSKENRGKSDDVPSEDVVRKMKSYWSKLLSAKLITQRKFDNLTKAERGGLTDDDKAGFIKRQLVETRQITKHVARILDERFYTETDENNKKIRQVKIVTLKSNLVSNFRKEFELYKVREINDYHHAHDAYLNAVIGKALLGVYPQLEPEFVYGDYPHFHGHKENKATAKKFFYSNIMNFFKKDDVRTDKNGEIIWKKDEHISNIKKVLSYPQVNIVKKVEEQTGGFSKESILPKGNSDKLIPRKTKKFYWDTKKYGGFDSPIVAYSILVIADIEKGKSKKLKTVKALVGVTIMEKMTFERDPVAFLERKGYRNVQEENIIKLPKYSLFKLENGRKRLLASARELQKGNEIVLPNHLGTLLYHAKNIHKVDEPKHLDYVDKHKDEFKELLDVVSNFSKKYTLAEGNLEKIKELYAQNNGEDLKELASSFINLLTFTAIGAPATFKFFDKNIDRKRYTSTTEILNATLIHQSITGLYETRIDLSKLGGD

SEQ ID NO: 494 - protein, 1345 aa, Streptococcus mutans; identical to SEQ ID NO: 493
  source 1..1345: note = M230

SEQ ID NO: 495 - protein, 1345 aa, Streptococcus mutans
  source 1..1345: note = M2A
MKKPYSIGLDIGTNSVGWAVVTDDYKVPAKKMKVLGNTDKSHIKKNLLGALLFDSGNTAEDRRLKRTARRRYTRRRNRILYLQEIFSEEMGKVDDSFFHRLEDSFLVTEDKRGERHPIFGNLEEEVKYHENFPTIYHLRQYLADNPEKTDLRLVYLALAHIIKFRGHFLIEGKFDTRNNDVQRLFQEFLAVYDNTFENSSLQEQNVQVEEILTDKISKSAKKDRVLKLFPNEKSNGRFAEFLKLIVGNQADFKKHFELEEKAPLQFSKDIYEEELEVLLAQIGDNYAELFLSAKKLYDSILLSGILTVTDVSTKAPLSASMIQRYNEHQMDLAQLKQFIRQKLSDKYNEVFSDVSKDGYAGYIDGKTNQEAFYKYLKGLLNKIEGSGYFLDKIEREDFLRKQRTFDNGSIPHQIHLQEMRAIIRRQAEFYPFLADNQDRIEKILTFRIPYYVGPLARGKSDFAWLSRKSADKITPWNFDEIVDKESSVEAFINRMTNYDLYLPNQKVLPKHSLLYEKFTVYNELTKVKYKTEQGKTAFFDANMKQEIFDGVFKVYRKVTKDKLMDFLEKEFDEFRIVDLTGLDKENKAFNASYGTYHDLRKILDKDFLDNSKNEKILEDIVLTLTLFEDREMIRKRLKNYSDLLTKEQLKKLERRHYTGWGRLSAELIHGIRNKESRKTILDYLIDDGNSNRNFMQLINDDALSFKEEIAKAQVIGETDNLNQVVSDIAGSPAIKKGILQSLKIVDELVKIMGHQPENIVVEMARENQFTNQGRRNSQQRLKGLTDSIKEFGSQILKEHPVENSQLQNDRLFLYYLQNGRDMYTGEELDIDYLSQYDIDHIIPQAFIKDNSIDNRVLTSSKENRGKSDDVPSKDVVRKMKSYWSKLLSAKLITQRKFDNLTKAERGGLTDDDKAGFIKRQLVETRQITKHVARILDERFNTETDENNKKIRQVKIVTLKSNLVSNFRKEFELYKVREINDYHHAHDAYLNAVIGKALLGVYPQLEPEFVYGDYPHFHGHKENKATAKKFFYSNIMNFFKKDDVRTDKNGEIIWKKDEHISNIKKVLSYPQVNIVKKVEEQTGGFSKESILPKGNSYKLIPRKTKKFYWDTKKYGGFDSPIVAYSILVIADIEKGKSKKLKTVKALVGVTIMEKMTFERDPVAFLERKGYRNVQEENIIKLPKYSLFKLENGRKRLLASARELQKGNEIVLPNHLGTLLYHAKNIHKVDEPKHLDYVDKHKDEFKELLDVVSNFSKKYTLAEGNLEKIKELYAQNNGEDLKELASSFINLLTFTAIGAPAAFKFFDKNIDRKRYTSTTEILNATLIHQSITGLYETRIDLSKLGGD

SEQ ID NO: 496 - protein, 1345 aa, Streptococcus mutans; identical to SEQ ID NO: 495
  source 1..1345: note = M2A

SEQ ID NO: 497 - protein, 1345 aa, Streptococcus mutans
  source 1..1345: note = N29
MKKPYSIGLDIGTNSVGWAVVTDDYKVPAKKMKVLGNTDKSHIKKNLLGALLFDSGNTAADRRLKRTARRRYTRRRNRILYLQEIFAEEMSKVDDSFFHRLEDSFLVTEDKRGERHPIFGNLEEEVKYHENFPTIYHLRQYLADNPEKVDLRLVYLALAHIIKFRGHFLIEGKFDTRNNDVQRLFQEFLAVYDNTFENSSLQEQNVQVEEILTDKISKSAKKDRVLKLFPNEKSNGRFAEFLKLIVGNQADFKKHFELEEKAPLQFSKDTYEEELEVLLAQIGDNYAELFLSAKKLYDSILLSGILTVTDVSTKAPLSASMIQRYNEHQMDLAQLKQFIRQKLSDKYNEVFSDVSKDGYAGYIDGKTNQEAFYKYLKGLLNKIEGSGYFLDKIEREDFLRKQRTFDNGSIPHQIHLQEMRAIIRRQAEFYPFLADNQDRIEKILTFRIPYYVGPLARGKSDFAWLSRKSADKITPWNFDEIVDKESSAEAFINRMTNYDLYLPNQKVLPKHSLLYEKFTVYNELTKVKYKTEQGKTAFFDANMKQEIFDGVFKVYRKVTKDKLMDFLEKEFDEFRIVDLTGLDKENKAFNASYGTYHDLRKILDKDFLDNSKNEKILEDIVLTLTLFEDREMIRKRLENYSDLLTKEQVKKLERRHYTGWGRLSAELIHGIRNKESRKTILDYLIDDGNSNRNFMQLINDDALSFKEEIAKAQVIGETDNLNQVVSDIAGSPAIKKGILQSLKIVDELVKIMGHQPENIVVEMARENQFTNQGRRNSQQRLKGLTDSIKEFGSQILKEHPVENSQLQNDRLFLYYLQNGRDMYTGEELDIDYLSQYDIDHIIPQAFIKDNSIDNRVLTSSKENRGKSDDVPSKNVVRKMKSYWSKLLSAKLITQRKFDNLTKAERGGLTDDDKAGFIKRQLVETRQITKHVARILDERFHTETDENNKKIRQVKIVTLKSNLVSNFRKEFELYKVREINDYHHAHDAYLNAVIGKALLGVYPQLEPEFVYGDYPHFHGHKENKATAKKFFYSNIMNFFKKDDVRTDKNGEIIWKKDEHISNIKKVLSYPQVNIVKKVEEQTGGFSKESILPKGNSDKLIPRKTKKFYWDTKKYGGFDSPIVAYSILVIADIEKGKSKKLKTVKALVGVTIMEKMTFERDPVAFLERKGYRNVQEENIIKLPKYSLFKLENGRKRLLASARELQKGNEIVLPNHLGTLLYHAKNIHKVDEPKHLDYVDKHKDEFKELLDVVSNFSKKYTLAEGNLEKIKELYAQNNGEDLKELSSSFINLLTFTAIGAPAAFKFFDKNIDRKRYTSTTEILNATLIHQSITGLYETRIDLSKLGGD

SEQ ID NO: 498 - protein, 1345 aa, Streptococcus mutans; identical to SEQ ID NO: 497
  source 1..1345: note = N29

SEQ ID NO: 499 - protein, 1345 aa, Streptococcus mutans
  source 1..1345: note = N3209
MKKPYSIGLDIGTNSVGWAVVTDDYKVPAKKMKVLGNTDKSHIKKNLLGALLFDSGNTAEDRRLKRTTRRRYTRRRNRILYLQEIFSEEMGKVDDSFFHRLEDSFLVTEDKRGERHPIFGNLEEEVKYHENFPTIYHLRQYLADNPEKTDLRLVYLALAHIIKFRGHFLIEGKFDTRNNDVQRLFQEFLAVYDNTFENSSLQEQNVQVEEILTDKISKSAKKDRVLKLFPNEKSNGCFAEFLKLIVGNQADFKKHFELEEKAPLQFSKDTYEEELEVLLAQIGDNYAELFLSAKKLYDSILLSGILTVTDVSTKAPLSASMIQRYNEHQMDLTQLKQFIRQKLSDKYNEVFSDVSKDGYAGYIDGKTNQEAFYKYLKGLLNKIEGSGYFLDKIEREDFLRKQRTFDNGSIPHQIHLQEMRAIIRRQAEFYPFLADNQDRIEKLLTFRIPYYVGPLASGKSDFAWLSRKSADKITPWNFDEIVDKESSAEAFINRMTNYDLYLPNQKVLPKHSLLYEKFTVYNELTKVKYKTEQGKTAFFDANMKQEIFDGVFKVYRKVTKDKLMDFLEKEFDEFRIVDLTGLDKENKVFNASYGTYHDLCKILDKDFLDNSKNEKILEDIVLTLTLFEDREMIRKRLENYSDLLTKEQVKKLERRHYTGWGRLSAELIHGIRNKESRKTILDYLIDDGNSNRNFMQLINDDALSFKEEIAKAQVIGETDNLNQVVSDIAGSPAIKKGILQSLKIVDELVKIMGHQPENIVVEMARENQFTNQGRRNSQQRLKGLTDSIKEFGSQILKEHPVENSQLQNDRLFLYYLQNGRDMYTGEELDIDYLSQYDIDHIIPQAFIKDNSIDNRVLTSSKENRGKSDDVPSKDVVRKMKSYWSKLLSAKLITQRKFDNLTKAERGGLTDDDKAGFIKRQLVETRQITKHVARILDERFNTETDENNKKIRQVKIVTLKSNLVSNFRKEFELYKVREINDYHHAHDAYLNAVIGKALLGVYPQLEPEFVYGDYPHFHGHKENKATAKKFFYSNIMNFFKKDDVRTDKNGEIIWKKDEHISNIKKVLSYPQVNIVKKVEEQTGGFSKESILPKGNSDKLIPRKTKKFYWDTKKYGGFDSPIVAYSILVIADIEKGKSKKLKTVKALVGVTIMEKMTFERDPVAFLERKGYRNVQEENIIKLPKYSLFKLENGRKRLLASARELQKGNEIVLPNHLGTLLYHAKNIHKVDEPKHLDYVDKHKDEFKELLDVVSNFSKKYTLAEGNLEKIKELYAQNNGEDLKELASSFINLLTFTAIGAPATFKFFDKNIDRKRYTSTTEILNATLIHQSITGLYETRIDLSKLGGD

SEQ ID NO: 500 - protein, 1345 aa, Streptococcus mutans; identical to SEQ ID NO: 499
  source 1..1345: note = N3209

SEQ ID NO: 501 - protein, 1345 aa, Streptococcus mutans
  source 1..1345: note = N66
MKKPYSIGLDIGTNSVGWAVVTDDYKVPAKKMKVLGNTDKSHIKKNLLGALLFDSGNTAEDRRLKRTARRRYTRRRNRILYLQEIFSEEMGKVDDSFFHRLEDSFLVTEDKRGERHPIFGNLEEEVKYHENFPTIYHLRQYLADNPEKTDLRLVYLALAHIIKFRGHFLIEGKFDTRNNDVQRLFQEFLAVYDNTFENSSLQEQNVQVEEILTDKISKSAKKDRVLKLFPNEKSNGRFAEFLKLIVGNQADFKKHFELEEKAPLQFSKDIYEEELEVLLAQIGDNYAELFLSAKKLYDSILLSGILTVTDVSTKAPLSASMIQRYNEHQMDLAQLKQFIRQKLSDKYNEVFSDVSKDGYAGYIDGKTNQEAFYKYLKGLLNKIEGSGYFLDKIEREDFLRKQRTFDNGSIPHQIHLQEMRAIIRRQAEFYPFLADNQDRIEKILTFRIPYYVGPLARGKSDFAWLSRKSADKITPWNFDEIVDKESSAEAFINRMTNYDLYLPNQKVLPKHSLLYEKFTVYNELTKVKYKTEQGKTAFFDANMKQEIFDGVFKVYRKVTKDKLMDFLEKEFDEFRIVDLTGLDKENKAFNASYGTYHDLRKILDKDFLDNSKNEKILEDIVLTLTLFEDREMIRKRLKNYSDLLTKEQLKKLERRHYTGWGRLSAELIHGIRNKESRKTILDYLIDDGNSNRNFMQLINDDALSFKEEIAKAQVIGETDNLNQVVSDIAGSLAIKKGILQSLKIVDELVKIMGHQPENIVVEMARENQFTNQGRRNSQQRLKGLTDSIKEFGSQILKEHPVENSQLQNDRLFLYYLQNGRDMYTGEELDIDYLSQYDIDHIIPQAFIKDNSIDNRVLTSSKENRGKSDDVPSKDVVRKMKSYWSKLLSAKLITQRKFDNLTKGERGGLTDDDKAGFIKRQLVETRQITKHVARILDERFNTETDENNKKIRQVKIVTLKSNLVSNFRKEFELYKVREINDYHHAHDAYLNAVIGKALLGVYPQLEPEFVYGDYPHFHGHKENKATAKKFFYSNIMNFFKKDDVRTDKNGEIIWKKDEYISNIKKVLSYPQVNIVKKVEEQTGGFFKESILPKGDSDKLIPRKTKKFYWDTKKYGGFDSPIVAYSILVIADIEKGKSKKLKTVKALVGVTIMEKMTFERDPVAFLERKGYRNVQEENIIKLPKYSLFKLENGRKRLLASARELQKGNEIVLPNHLGTLLYHAKNIHKVDEPKHLDYVDKHKDEFKELLDVVSNFSKKYTLAEGNLEKIKELYAQNNGEDLKELASSFINLLTFTAIGAPATFKFFDKNIDRKRYTSTTEILNATLIHQSITGLYETRIDLSKLGGD

SEQ ID NO: 502 - protein, 1345 aa, Streptococcus mutans; identical to SEQ ID NO: 501
  source 1..1345: note = N66

SEQ ID NO: 503 - protein, 1350 aa, Streptococcus mutans
  source 1..1350: note = NFSM1
MKKPYSIGLDIGTNSVGWAVVTDDYKVPAKKMTVLGNTDKSHIKKNLLGALLFDSGNTAADRRLKRTARRRYTRRRNRILYLQEIFAEEMSKVDDSFFHRLEDSFLVTEDKRGERHPIFGNLEEEVKYHENFPTIYHLRQYLADNPEKVDLRLVYLALAHIIKFRGHFLIEGKFDTRNNDVQRLFQEFLAVYDNTFENSSLQEQNVQVEEILTDKISKSAKKDRVLKLFPNEKSNGRFAEFLKLIVGNQADFKKHFELEEKTPLQFSKDTYEEELEVLLAQIGDNYAELFLSAKKLYDSILLSGILTVTDVSTKAPLSASMIQRYNEHQMDLAQLKQFIRQKLSDKYNEVFSDVSKDGYAGYIDGKTNQEAFYKYLKGLLNKIEGSGYFLDKIEREDFLRKQRTFDNGSIPHQIHLQEMRAIIRRQAEFYPFLADNQDRIEKILTFRIPYYVGPLARGKSDFAWLSRKSADKITPWNFDEIVDKESSAEAFINRMTNYDLYLPNQKVLPKHSLLYEKFTVYNELTKVKYKTEQGKTAFFDANMKQEIFDGVFKVYRKVTKDKLMDFLEKEFDEFRIVDLTGLDKENKAFNASYGTYHDLRKILDKDFLDNSKNEKILEDIVLTLTLFEDREMIRKRLENYSDLLTKEQVKKLERRHYTGWGRLSAELIHGIRNKESRKTILDYLIDDGNSNRNFMQLINDDALSFKEEIAKAQVIGETDNLNQVVSDIAGSPAIKKGILQSLKIVDELVKIMGHQPENIVVEMARENQFTNQGRRNSQQRLKGLTDSIKEFGSQILKEHPVENSQLQNDRLFLYYLQNGRDMYTGEELDIDYLSQYDIDHIIPQAFIKDNSIDNRVLTSSKENRGKSDDVPSEDVVNRMRPFWNKLLSSGLISQRKYNNLTKKELTPDDKAGFIKRQLVETRQITKHVARMLDERFNKEFDDNNKRIRRVKIVTLKSNLVSSFRKEFELYKVREINDYHHAHDAYLNAVVVKALLVKYPKLEPEFVYGEYPKYNSYRERKTATQKMFFYSNIMNMFKSKVKLADDQIVERPMIEVNDETGEIAWDKTKHITTVKKVLSYPQVNIVKKVEEQTIGQNGGLFDDNPKSPLEVIPSKLVPLKKALNPEKYGGYQKPTTAYPILLIVDTKQLIPISVMDKKRFEQNPVKFLKDKGYQQIEKNNFVKLPKYTLVDIGNGIKRLWASSKEVHKGNQLVVSKKSQDLLYHAHHLDNDYSNEYVKNHYQQFDILFNEITSFSKKCKLGKEHIQKIEEAYSKERDSASIEELADGFIKLLGFTQLGATSPFSFLGIKLNQKQYTGKKDYLLPCMEATLIHQSITGLYETRIDLSKLGGD

SEQ ID NO: 504 - protein, 1350 aa, Streptococcus mutans; identical to SEQ ID NO: 503
  source 1..1350: note = NFSM1

SEQ ID NO: 505 - protein, 1345 aa, Streptococcus mutans; identical to SEQ ID NO: 477
  source 1..1345: note = NLML1

SEQ ID NO: 506 - protein, 1338 aa, Streptococcus mutans
  source 1..1338: note = NLML4
MDLIGTNSVGWAVVTDDYKVPAKKMKVLGNTDKSHIKKNLLGALLFDSGNTAADRRLKRTARRRYTRRRNRILYLQEIFAEEMSKVDDSFFHRLEDSFLVTEDKRGERHPIFGNLEEEVKYHENFPTIYHLRQYLADNPEKVDLRLVYLALAHIIKFRGHFLIEGKFDTRNNDVQRLFQEFLAVYDNTFENSSLQEQNVQVEEILTDKISKSAKKDRVLKLFPNEKSNGRFAEFLKLIVGNQADFKKHFELEEKAPLQFSKDTYEEELEVLLAQIGDNYAELFLSAKKLYDSILLSGILTVTDVSTKAPLSASMIQRYNEHQMDLAQLKQFIRQKLSDKYNEVFSDVSKDGYAGYIDGKTNQEAFYKYLKGLLNKIEGSGYFLDKIEREDFLRKQRTFDNGSIPHQIHLQEMRAIIRRQAEFYPFLADNQDRIEKILTFRIPYYVGPLARGKSDFAWLSRKSADKITPWNFDEIVDKESSAEAFINRMTNYDLYLPNQKVLPKHSLLYEKFTVYNELTKVKYKTEQGKTAFFDANMKQEIFDGVFKVYRKVTKDKLMDFLEKEFDEFRIVDLTGLDKENKAFNASYGTYHDLRKILDKDFLDNSKNEKILEDIVLTLTLFEDREMIRKRLENYSDLLTKEQVKKLERRHYTGWGRLSAELIHGIRNKESRKTILDYLIDDGNSNRNFMQLINDDALSFKEEIAKAQVIGETDNLNQVVSDIAGSPAIKKGILQSLKIVDELVKIMGHQPENIVVEMARENQFTNQGRRNSQQRLKGLTDSIKEFGSQILKEHPVEHSQLQNDRLFLYYLQNGRDMYTGEELDIDYLSQYDIDHIIPQAFIKDNSIDNRVLTSSKENRGKSDDVPSKNVVRKMKSYWSKLLSAKLITQRKFDNLTKAERGGLTDDDKAGFIKRQLVETRQITKHVARILDERFHTETDENNKKIRQVKIVTLKSNLVSNFRKEFELYKVREINDYHHAHDAYLNAVIGKALLGVYPQLEPEFVYGDYPHFHGHKENKATAKKFFYSNIMNFFKKDDVRTDKNGEIIWKKDEHISNIKKVLSYPQVNIVKKVEEQTGGFSKESILPKGNSDKLIPRKTKKFYWDTKKYGGFDSPIVAYSILVIADIEKGKSKKLKTVKALVGVTIMEKMTFERDPVAFLERKGYRNVQEENIIKLPKYSLFKLENGRKRLLASARELQKGNEIVLPNHLGTLLYHAKNIHKVDEPKHLDYVDKHKDEFKELLDVVSNFSKKYTLAEGNLEKIKELYAQNNGEDLKELASSFINLLTFTAIGAPATFKFFDKNIDRKRYTSTTEILNATLIHQSITGLYETRIDLSKLGGD

SEQ ID NO: 507 - protein, 1338 aa, Streptococcus mutans; identical to SEQ ID NO: 506
  source 1..1338: note = NLML4

SEQ ID NO: 508 - protein, 1128 aa, Streptococcus mutans
  source 1..1128: note = NLML5
MANSKILGLDIGIASVGVGIIDKETGKIIHVNSRIFPAATADSNVERRGFRQGRRLVRRKKHRKVRLADLFLDSNLLTDFSKVSLNLNPYQLRVKGLNEELSNEELFIALKSIVSRRGISYLDDASEDSGANSSEYGKAVEENRKLLEDRTPGQIQLERFEKYGKVRGDFTVVENGENHRLINVFSTSAYKKEAERILRRQQEFNIRIADEFIEAYLTILTGKRKYYHGPGNEKSRTDYGRFRTDGTTLDNIFGILIGKCTFYPDEYRAAKASYTAQEFNLLNDLNNLTVPTETKKLSEEQKRQIIEHAKTVKTLGAPTLLKYIAKLVGCSADDIKGYRIDKSDKPEIHTFEAYRKMRTMELIKVADLSRESLDALAHILTLNTEREGIEEAIRDRFTNKEFNQEQINELVLFRKNNSSLFGKGWHNFSLKLMKELIPELYETSEEQMTILTRLGKQRVKKSSNRTNYIDEKELTEEIYNPVVAKSVRQAIKIINLATKKYGVFDNIVIEMARESNEDDEKKAIQNAQKANEDEKEAALLKAAHQFNGKEELPDSIFHGHKELLTKIRLWHQQGEKCLYTGKTIFINDLIHNPYKYEIDHILPLSLSFDDSLANKVLVLSTANQEKGQRTPFQSLDSMDGAWTYREFKAYVKGLKTLSNKKKDYLLNEEDINKNEVKQKFIERNLVDTRYSSRVVLNTLQDFYKKREFDTKISVVRGQFTSQIRRKWRIEKTRETYHHHAVDALIIAASSQLNLWKKQNNPLISYKEDQFVDPETGEILSLSDDEYKELVFKAPYDHFVDTLKSKKFEDSILFSYQVDSKYNRKISDATIYGTRKARLGKDSQEETYVLGKIKDIYSQKGYEDFIKKYKKDKTQFLMYHKDPQTFEKVIEEILKTYSDKELNEKGKEVPCNPFEKYRQENGPVRKYSKKGNGPEIKSIKYYDNKLGNHIDITPNNSHHQVVLQSLKPWRTDVYFNPKSGKYELMGLKYSDLRFEKVSGDYGISVKKYNEIKSKEGVDENSEFKFTLYKNDLILIKDTESGEQELFRFLSRTMPNQKHYVELKPYDKSKFEGHQKLMDIFGEVAKGGQCLKGLNKSNISIYKVKTDVLGNKYFIKKEGDQPQLNFKKKI

SEQ ID NO: 509 - protein, 1128 aa, Streptococcus mutans; identical to SEQ ID NO: 508
  source 1..1128: note = NLML5

SEQ ID NO: 510 - protein, 1125 aa, Streptococcus mutans
  source 1..1125: note = NLML8
MTNGKILGLDIGIASVGVGIINAKTGNVEHASSRIFPAANADNNVERRSARGGRRLIRRKKHRLKRVEDLFEKYNIDTDFSNLNLNPYQLRVKGLNEQLSNEELFAILKNIAKRRGISYLDDAEDDSVGSSDYAKAIDENRKLLKKQTPGEIQLKRLEKYGQLRGNFTIQDENGEYHRLINVFSTSDYVKEARRILETQSYYNKFITESFVEDYIKILQGKRKYYVGPGNEKSRTDYGIYRTDGETLDNLFGILIGKCGFYPEEYRAAKASYTAQEYNFLNDLNNLTVPTETKKLSTEQKYQLVDFAKTASTLEAAKLLKEIAKLVGCQVEEIKGYRLDNKDKPDLHTFEPFRKLKSNLTTIAVENLSITTLDTLAHILTLNTEREGIEEAIQKELPNIFSDEQITGIIAVRKKNSQIFGKGWHSFSIKLMKELIPELYETSEEQMTILIRLKKVKTNSKITNRTKYINEQEVTDEIYNPVVSKSIRQTVKIINAAIKKYGAFDQIVIEMPRESNEEDERKFIADLQKSNAKEKDDAMKQAALLYNGKAELPHGVFHGHKELATKIRLWYQQGERCLYSGKHIDIHDLIHNQHMFEIDHVLPLSLSFDDSLANKVLVYSWANQEKGQRTPFQALPQMASAWSFRELRDYISKQKGISKKKRDYLLTEQDINKVEVKQKFIERNLVDTRYVSRVVLNTLQDALKVMNKETKISVIRGQFTSQLRRQWRIDKSRETYHHHAVDALIIAASSQLRLWKKQNNPMFAEDKHGQKINLDTGEVLSDDAYKELVYQAPYQGFVNTISSKSFEDEILFSYQVDSKVNRKISDATIYATRQAQLGKDKKEETYVLGKIKDIYSQAGYDAFRKKYDKDKAVFLMYQKDPETWEKVIEVILRDYKELDDKGKEIGNPFERYKVKHGFVRKYSRKNKGTEIKSLKYYDNKLGNHIDITPNNSKHSVVLQSINPWRADLYFNPETTKYELMGLKYADLSFEKGTGKYSISREKYDEIKEREGISSKSEFKFTLYKNDLILVKDIGNHKELIARFNSKNDTSKHYVELKPWNKAKFDSEEELIPAFGKVAKSGQFIKGLNKPDLSIYKVKTDILGHKYYIKKEGDKPKLNFENKIKNK

SEQ ID NO: 511 - protein, 1125 aa, Streptococcus mutans; identical to SEQ ID NO: 510
  source 1..1125: note = NLML8

SEQ ID NO: 512 - protein, 1345 aa, Streptococcus mutans
  source 1..1345: note = NLML9
MKKPYSIGLDIGTNSVGWAVVTDDYKVSAKKMKVLGNTDKSHIKKNLLGALLFDSGNTAEDRRLKRTARRRYTRRRNRILYLQEIFAEEMSKVDDSFFHRLEDSFLVTEDKRGERHPIFGNLEEEVKYHENFPTIYHLRQYLADNPEKVDLRLVYLALAHIIKFRGHFLIEGKFDTRNNDVQRLFQEFLAVYDNTFENSSLQEQNVQVEEILTDKISKSAKKDRVLKLFPNEKSNGRFAEFLKLIVGNQADFKKHFELEEKAPLQFSKDTYEEELEVLLAQIGDNYAELFLSAKKLYDSILLSGILTVTDVSTKAPLSASMIQRYNEHQMDLAQLKQFIRQKLSDKYNEVFSDVSKDGYAGYIDGKTNQEAFYKYLKGLLNKIEGSGYFLDKIEREDFLRKQRTFDNGSIPHQIHLQEMRAIIRRQAEFYPFLADNQDRIEKILTFRIPYYVGPLARGKSDFAWLSRKSADKITPWNFDEIVDKESSAEAFINRMTNYDLYLPNQKVLPKHSLLYEKFTVYNELTKVKYKTEQGKTAFFDANMKQEIFDGVFKVYRKVTKDKLMDFLEKEFDEFRIVDLTGLDKENKAFNASYGTYHDLRKILDKDFLDNSKNEKILEDIVLTLTLFEDREMIRKRLENYSDLLTKEQVKKLERRHYTGWGRLSAELIHGIRNKESRKTILDYLIDDGNSNRNFMQLINDDALSFKEEIAKAQVIGETDNLNQVVSDIAGSPAIKKGILQSLKIVDELVKIMGHQPENIVVEMARENQFTNQGRRNSQQRLKGLTDSIKEFGSQILKEHPVEHSQLQNDRLFLYYLQNGRDMYTGEELDIDYLSQYDIDHIIPQAFIKDNSIDNRVLTSSKENRGKSDDVPSKNVVRKMKSYWSKLLSAKLITQRKFDNLTKAERGGLTDDDKAGFIKRQLVETRQITKHVARILDERFHTETDENNKKIRQVKIVTLKSNLVSNFRKEFELYKVREINDYHHTHDAYLNAVIGKALLGVYPQLEPEFVYGDYPHFHGHKENKATAKKFFYSNIMNFFKKDDVRTDKNGEIIWKKDEHISNIKKVLSYPQVNIVKKVEEQTGGFSKESILPKGNSDKLIPRKTKKFYWDTKKYGGFDSPIVAYSILVIADIEKGKSKKLKTVKALVGVTIMEKMTFERDPVAFLERKGYRNVQEENIIKLPKYSLFKLENGRKRLLASARELQKGNEIVLPNHLGTLLYHAKNIHKVDEPKHLDYVDKHKDEFKELLDVVSNFSKKYTLAEGNLEKIKELYAQNNGEDLKELASSFINLLTFTAIGAPATFKFFDKNIDRKRYTSTTEILNATLIHQSITGLYETRIDLSKLGGD

SEQ ID NO: 513 - protein, 1345 aa, Streptococcus mutans; identical to SEQ ID NO: 512
  source 1..1345: note = NLML9

SEQ ID NO: 514 - protein, 1355 aa, Streptococcus mutans
  source 1..1355: note = NMT4863
MKKPYSIGLDIGTNSVGWAVVTDDYKVPAKKMKVLGNTDKSHIKKNLLGALLFDSGNTAEDRRLKRTARRRYTRRRNRILYLQEIFAEEMSKVDDSFFHRLDESFLTDDDKNFDSHPIFGNKAEEDAYHQKFPTIYHLRKHLADSTEKADLRLVYLALAHMIKFRGHFLIEGELNAENTDVQKLFADFVGVYDRTFDDSHLSEITVDASSILTEKISKSRRLEKLINNYPKEKKNTLFGNLIALSLGLQPNFKTNFKLSEDAKLQFSKDTYEEDLEELLGKIGDDYADLFTLAKNLYDAILLSGILTADDSSTKAPLSASMIKRYAEHHEDLEKLKEFIKANKPELYHDIFKDETKNGYAGYIENGVKQDEFYKYLKNTLSKITGSDYFLDQIEREDFLRKQRTFDNGSIPHQIHLQEMHAILRRQGDYYPFLKENQDRIEKILTFRIPYYVGPLARKNSRFAWAEYHSDEAVTPWNFDQVIDKESSAQAFIEHMTNNDLYLPNEKVLPKHSPLYEKYTVYNELTKIKYVTEIGEAKFFDANLKQEIFDGLFKHERKVTKKKLRTFLDKNFDEFRIVDIQGLDKETETFNASYATYQDLLKVIKDKVFMDNPENAEILENIVLTLTLFEDREMIKQRLAKYADVFDKKVIDQLARRHYTGWGRLSAKLLNGIRDKQSCKTIMDYLIDDAQSNRNLMQLITDDNLTFKDDIVKAQYVDNSDDLHQVVQSLAGSPAIKKGILQSLKIVDELVKVMGKEPEQIVVEMARENQTTAKGRRNSQQRYKRLKEAIKSLDRDLNHKILKEHPTDNQALQNNRLFLYYLQNGRDMYTGESLDINRLSDYDIDHVIPQAFIKDNSIDNRVLTSSKANRGKSDDVPSEDVVNRMRPFWNKLLSSGLISQRKYNNLTKKELTLDDKAGFIKRQLVETRQITKHVARMLDERFNKEFDDNNKRIRRVKIVTLKSNLVSSFRKEFELYKVREINDYHHAHDAYLNAVVVKALLVKYPKLEPEFVYGEYPKYNSYRERKTATQKMFFYSNIMNMFKSKVKLADDQIVERPMIEVNDETGEIAWDKTKHITTVKKVLSYPQVNIVKKVEEQTIGQNGGLFDDNPKSPLEVIPSKLVPLKKALNPEKYGGYQKPTTAYPILLIVDTKQLIPISVMDKKRFEQNPVKFLKDKGYQQIEKNNFVKLPKYTLVDIGNGIKRLWASSKEVHKGNQLVVSKKSQDLLYHAHHLDNDYSNEYVKNHYQQFDILFNEITSFSKKCKLGKEHIQKIEEAYSKERDFASIEELADGFIKLLGFTQLGATSPFSFLGIKLNQKQYTGKKDYLLPCMEATLIHQSITGLYETRIDLSKLGGD

SEQ ID NO: 515 - protein, 1355 aa, Streptococcus mutans; identical to SEQ ID NO: 514
  source 1..1355: note = NMT4863

SEQ ID NO: 516 - protein, 1345 aa, Streptococcus mutans
MKKPYSIGLDIGTNSVGWAVVTDDYKVPAKKMKVLGNTDKSHIKKNLLGALLFDSGNTAADRRLKRTARRRYTRRRNRILYLQEIFAEEMSKVDDSFFHRLEDSFLVTEDKRGERHPIFGNLEEEVKYHENFPTIYHLRQYLADNPEKVDLRLVYLALAHIIKFRGHFLIEGKFDTRNNDVQRLFQEFLAVYDNTFENSSLQEQNVQVEEILTDKISKSAKKDRVLKLFPNEKSNGRFAEFLKLIVGNQADFKKHFELEEKAPLQFSKDTYEEELEVLLAQIGDNYAELFLSAKKLYDSILLSGILTVTDVSTKAPLSASMIQRYNEHQMDLAQLKQFIRQKLSDKYNEVFSDVSKDGYAGYIDGKTNQEAFYKYLKGLLNKIEGSGYFLDKIEREDFLRKQRTFDNGSIPHQIHLQEMRAIIRRQAEFYPFLADNQDRIEKILTFRIPYYVGPLARGKSDFAWLSRKSADKITPWNFDEIVDKESSAEAFINRMTNYDLYLPNQKVLPKHSLLYEKFTVYNELTKVKYKTEQGKTAFFDANMKQEIFDGVFKVYRKVTKDKLMDFLEKEFDEFRIVDLTGLDKENKAFNASYGTYHDLRKILDKDFLDNSKNEKILEDIVLTLTLFEDREMIRKRLENYSDLLTKEQVKKLERRHYTGWGRLSAELIHGIRNKESRKTILDYLIDDGNSNRNFMQLINDDALSFKEEIAKAQVIGETDNLNQVVSDIAGSPAIKKGILQSLKIVDELVKIMGHQPENIVVEMARENQFTNQGRRNSQQRLKGLTDSIKEFGSQILKEHPVKHSQLQNDRLFLYYLQNGRDMYTGEELDIDYLSQYDIDHIIPQAFIKDNSIDNRVLTSSKENRGKSDDVPSKNVVRKMKSYWSKLLSAKLITQRKFDNLTKAERGGLTDDDKAGFIKRQLVETRQITKHVARILDERFHTETDENNKKIRQVKIVTLKSNLVSNFRKEFELYKVREINDYHHAHDAYLNAVIGKALLGVYPQLEPEFVYGDYPHFHGHKENKATAKKFFYSNIMNFFKKDDVRTDKNGEIIWKKDEHISNIKKVLSYPQVNIVKKVEEQTGGFSKESILPKGNSDKLIPRKTKKFYWDTKKYGGFDSPIVAYSILVIADIEKGKSKKLKTVKALVGVTIMEKMTFERDPVAFLERKGYRNVQEENIIKLPKYSLFKLENGRKRLLASARELQKGNEIVLPNHLGTLLYHAKNIHKVDEPKHLDYVDKHKDEFKELLDVVSNFSKKYTLAEGNLEKIKELYAQNNGEDLKELASSFINLLTFTAIGAPATFKFFDKNIDRKRYTSTTEILNATLIHQSITGLYETRIDLSKLGGD

SEQ ID NO: 517 - protein, 1345 aa, Streptococcus mutans; identical to SEQ ID NO: 463
  source 1..1345: note = NV1996

SEQ ID NO: 518 - protein, 1345 aa, Streptococcus mutans
  source 1..1345: note = NVAB
MKKPYSIGLDIGTNSVGWAVVTDDYKVPAKKMKVLGNTDKSHIKKNLLGALLFDSGNTAADRRLKRTARRRYTRRRNRILYLQEIFAEEMSKVDDSFFHRLEDSFLVTEDKRGERHPIFGNLEEEVKYHENFPTIYHLRQYLADNPEKVDLRLVYLALAHIIKFRGHFLIEGKFDTRNNDVQRLFQEFLAVYDNTFENSSLQEQNVQVEEILTDKISKSAKKDRVLKLFPNEKSNGRFAEFLKLIVGNQADFKKHFELEEKAPLQFSKDTYEEELEVLLAQIGDNYAELFLSAKKLYDSILLSGILTVTDVSTKAPLSASMIQRYNEHQMDLAQLKQFIRQKLSDKYNEVFSDVSKDGYAGYIDGKTNQEAFYKYLKGLLNKIEGSGYFLDKIEREDFLRKQRTFDNGSIPHQIHLQEMRAIIRRQAEFYPFLADNQDRIEKILTFRIPYYVGPLARGKSDFAWLSRKSADKITPWNFDEIVDKESSAEAFINRMTNYDLYLPNQKVLPKHSLLYEKFTVYNELTKVKYKTEQGKTAFFDANMKQEIFDGVFKVYRKVTKDKLMDFLEKEFDEFRIVDLTGLDKENKVFNASYGTYHDLCKILDKDFLDNSKNEKILEDIVLTLTLFEDREMIRKRLENYSDLLTKEQVKKLERRHYTGWGRLSAELIHGIRNKESRKTILDYLIDDGNSNRNFMQLINDDALSFKEEIAKAQVIGETDNLNQVVSDIAGSPAIKKGILQSLKIVDELVKIMGHQPENIVVEMARENQFTKQGRRNSQQRLKGLTDSIKEFGSQILKEHPVENSQLQNDRLFLYYLQNGRDMYTGEELDIDYLSQYDIDHIIPQAFIKDNSIDNRVLTSSKENRGKSDDVPSKDVVRKMKSYWSKLLSAKLITQRKFDNLTKAERGGLTDDDKAGFIKRQLVETRQITKHVARILDERFYTETDENNKKIRQVKIVTLKSNLVSNFRKEFELYKVREINDYHHAHDAYLNAVIGKALLGVYPQLEPEFVYGDYPHFHGHKENKATAKKFFYSNIMNFFKKDDVRTDKNGEIIWKKDEHISNIKKVLSYPQVNIVKKVEEQTGGFSKESILPKGNSDKLIPRKTKKFYWDTKKYGGFDSPIVAYSILVIADIEKGKSKKLKTVKALVGVTIMEKMTFERDPVAFLERKGYRNVQEENIIKLPKYSLFKLENGRKRLLASARELQKGNEIVLPNHLGTLLYHAKNIHKVDEPKHLDYVDKHKDEFKELLDVVSNFSKKYTLAEGNLEKIKELYAQNNGEDLKELASSFINLLTFTAIGAPATFKFFDKNIDRKRYTSTTEILNATLIHQSITGLYETRIDLSKLGGD

SEQ ID NO: 519 - protein, 1345 aa, Streptococcus mutans; identical to SEQ ID NO: 518
  source 1..1345: note = NVAB

SEQ ID NO: 520 - protein, 1345 aa, Streptococcus mutans
  source 1..1345: note = R221
MKKPYSIGLDIGTNSVGWAVVTDDYKVPAKKMKVLGNTDKSHIKKNLLGALLFDSGNTAEDRRLKRTARRRYTRRRNRILYLQEIFSEEMGKVDDSFFHRLEDSFLVTEDKRGERHPIFGNLEEEVKYHENFPTIYHLRQYLADNPEKTDLRLVYLALAHIIKFRGHFLIEGKFDTRNNDVQRLFQEFLAVYDNTFENSSLQEQNVQVEEILTDKISKSAKKDRVLKLFPNEKSNGRFAEFLKLIVGNQADFKKHFELEEKAPLQFSKDIYEEELEVLLAQIGDNYAELFLSAKKLYDSILLSGILTVTDVSTKAPLSASMIQRYNEHQMDLAQLKQFIRQKLSDKYNEVFSDVSKDGYAGYIDGKTNQEAFYKYLKGLLNKIEGSGYFLDKIEREDFLRKQRTFDNGSIPHQIHLQEMRAIIRRQAEFYPFLADNQDRIEKILTFRIPYYVGPLARGKSDFAWLSRKSADKITPWNFDEIVDKESSVEAFINRMTNYDLYLPNQKVLPKHSLLYEKFTVYNELTKVKYKTEQGKTAFFDANMKQEIFDGVFKVYRKVTKDKLMDFLEKEFDEFRIVDLTGLDKENKAFNASYGTYHDLRKILDKDFLDNSKNEKILEDIVLTLTLFEDREMIRKRLKNYSDLLTKEQLKKLERRHYTGWGRLSAELIHGIRNKESRKTILDYLIDDGNSNRNFMQLINDDALSFKEEIAKAQVIGETDNLNQVVSDIAGSPAIKKGILQSLKIVDELVKIMGHQPENIVVEMARENQFTNQGRRNSQQRLKGLTDSIKEFGSQILKEHPVENSQLQNDRLFLYYLQNGRDMYTGEELDIDYLSQYDIDHIIPQAFIKDNSIDNRVLTSSKENRGKSDDVPSKDVVRKMKSYWSKLLSAKLITQRKFDNLTKAERGGLTDDDKAGFIKRQLVETRQITKHVARILDERFNTETDENNKKIRQVKIVTLKSNLVSNFRKEFELYKVREINDYHHAHDAYLNAVIGKALLGVYPQLEPEFVYGDYPHFHGHKENKATAKKFFYSNIMNFFKKDDVRTDKNGEIIWKKDEHISNIKKVLSYPQVNIVKKVEEQTGGFSKESILPKGNSDKLIPRKTKKFYWDTKKYGGFDSPIVAYSILVIADIEKGKSKKLKTVKALVGVTIMEKMTFERDPVAFLERKGYRNVQEENIIKLPKYSLFKLENGRKRLLASARELQKGNEIVLPNHLGTLLYHAKNIHKVDEPKHLDYVDKHKDEFKELLDVVSNFSKKYTLAEGNLEKIKELYAQNNGEDLKELASSFINLLTFTAIGAPATFKFFDKNIDRKRYTSTTEILNATLIHQSITGLYETRIDLNKLGGD

SEQ ID NO: 521 - protein, 1345 aa, Streptococcus mutans; identical to SEQ ID NO: 520
  source 1..1345: note = R221

SEQ ID NO: 522 - protein, 1345 aa, Streptococcus mutans
  source 1..1345: note = S1B
MKKPYSIGLDIGTNSVGWAVVTDDYKVPAKKMKVLGNTDKSHIKKNLLGALLFDSGNTAEDRRLKRTARRRYTRRRNRILYLQEIFSEEMGKVDDSFFHRLDESFLTDDDKNFDSYPIFGNKAEEDAYHQKFPTIYHLRKHLADSTEKADLRLVYLALAHMIKFRGHFLIEGELNAENTDVQKLFADFVGVYDRTFDDSHLSEITVDASSILTEKISKSRRLEKLINNYPKEKKNTLFRNLVALSLGLQPNFKTNFKLSEDAKLQFSKDTYEEDLEELLGKIGDDYADLFTLAKNLYDAILLSGILTADDSSTKAPLSASMIKRYAEHHEDLEKLKEFIKANKPELYHDIFKDETKNGYAGYIENGVKQDEFYKYLKNTLSKIAGSDYFLDKIEREDFLRKQRTFDNGSIPHQIHLQEMHAILRRQGDYYPFLKENQDRIEKILTFRIPYYVGPLARGKSDFAWLSRKSADKITPWNFDEIVDKESSVEAFINRMTNYDLYLPNQKVLPKHSLLYEKFTVYNELTKVKYKTEQGKTAFFDANMKQEIFDGVFKVYRKVTKDKLMDFLEKEFDEFRIVDLTGLDKENKAFNASYGTYHDLRKILDKDFLDNSKNEKILEDIVLTLTLFEDREMIRKRLKNYSDLLTKEQLKKLERRHYTGWGRLSAELIHGIRNKESRKTILDYLIDDGNSNRNFMQLINDDALSFKEEIAKAQVIGETDNLNQVVSDIAGSPAIKKGILQSLKIVDELVKIMGHQPENIVVEMARENQFTNQGRRNSQQRLKGLTDSIKEFGSQILKEHPVENSQLQNDRLFLYYLQNGRDMYTGEELDIDYLSQYDIDHIIPQAFIKDNSIDNRVLTSSKENRGKSDDVPSKDVVRKMKSYWSKLLSAKLITQRKFDNLTKGERGGLTDDDKAGFIKRQLVETRQITKHVARILDERFNTETDENNKKIRQVKIVTLKSNLVSNFRKEFELYKVREINDYHHAHDAYLNAVIGKALLGVYPQLEPEFVYGDYPHFHGHKENKATAKKFFYSNIMNFFKKDDVRTDKNGEIIWKKDEYISNIKKVLSYPQVNIVKKVEEQTGGFSKESILPKGDSDKLIPRKTKKFYWDTKKYGGFDSPIVAYSILVIADIEKGKSKKLKTVKALVGVTIMEKMTFERDPVAFLERKGYRNVQEENIIKLPKYSLFKLENGRKRLLASARELQKGNEIVLPNHLGTLLYHAKNIHKVDEPKHLDYVDKHKDEFKELLDVVSNFSKKYTLAEGNLEKIKELYAQNNGEDLKELASSFINLLTFTAIGAPATFKFFDKNIDRKRYTSTTEILNATLIHQSITGLYETRIDLSKLGGD

SEQ ID NO: 523 - protein, 1345 aa, Streptococcus mutans; identical to SEQ ID NO: 522
  source 1..1345: note = S1B

SEQ ID NO: 524 - protein, 1345 aa, Streptococcus mutans; identical to SEQ ID NO: 463
  source 1..1345: note = SF1

SEQ ID NO: 525 - protein, 1345 aa, Streptococcus mutans
  source 1..1345: note = SF14
MKKPYSIGLDIGTNSVGWAVVTDDYKVPAKKMKVLGNTDKSHIKKNLLGALLFDSGNTAEDRRLKRTARRRYTRRRNRILYLQEIFSEEMGKVNDSFFHRLEDSFLVTEDKRGERHPIFGNLEEEVKYHENFPTIYHLRQYLADNPEKVDLRLVYLALAHIIKFRGHFLIEGKFDTRNNDVQRLFQEFLAVYDNTFENSSLQEQNVQVEEILTDKISKSAKKDRVLKLFPNEKSNGRFAEFLKLIVGNQADFKKHFELEEKAPLQFSKDTYEEELEVLLAQIGDNYAELFLSAKKLYDSILLSGILTVTDVSTKAPLSASMIQRYNEHQMDLAQLKQFIRQKLSDKYNEVFSDVSKDGYAGYIDGKTNQEAFYKYLKGLLNKIEGSGYFLDKIEREDFLRKQRTFDNGSIPHQIHLQEMRAIIRRQAEFYPFLADNQDRIEKILTFRIPYYVGPLARGKSDFAWLSRKSADKITPWNFDEIVDKESSAEAFINRMTNYDLYLPNQKVLPKHSLLYEKFTVYNELTKVKYKTEQGKTAFFDANMKQEIFDGVFKVYRKVTKDKLMDFLEKEFDEFRIVDLTGLDKENKVFNASYGTYHDLCKILDKDFLDNSKNEKILEDIVLTLTLFEDREMIRKRLENYSDLLTKEQVKKLERRHYTGWGRLSAELIHGIRNKESRKTILDYLIDDGNSNRNFMQLINDDALSFKEEIAKAQVIGETDNLNQVVSDIAGSPAIKKGILQSLKIVDELVKIMGHQPENIVVEMARENQFTKQGRRNSQQRLKGLTDSIKEFGSQILKEHPVENSQLQNDRLFLYYLQNGRDMYTGEELDIDYLSQYDIDHIIPQAFIKDNSIDNRVLTSSKENRGKSDDVPSKDVVRKMKSYWSKLLSAKLITQRKFDNLTKAERGGLTDDDKAGFIKRQLVETRQITKHVARILDERFYTETDENNKKIRQVKIVTLKSNLVSNFRKEFELYKVREINDYHHAHDAYLNAVIGKALLGVYPQLEPEFVYGDYPHFHGHKENKATAKKFFYSNIMNFFKKDDVRTDKNGEIIWKKDEYISNIKKVLSYPQVNIVKKVEEQTGGFSKESILPKGNSDKLIPRKTKKFYWDTKKYGGFDSPIVAYSILVIADIEKGKSKKLKTVKALVGVTIMEKMTFERDPIAFLERKGYRNVQEENIIKLPKYSLFKLENGRKRLLASARELQKGNEIVLPNHLGTLLYHAKNIHKVDEPKHLDYVDKHKDEFKELLDVVSNFSKKYTLAEGNLEKIKELYAQNNGEDLKELASSFINLLTFTAIGAPAAFKFFDKNIDRKRYTSTTEILNATLIHQSITGLYETRIDLSKLGGD

SEQ ID NO: 526 - protein, 1345 aa, Streptococcus mutans; identical to SEQ ID NO: 525
  source 1..1345: note = SF14

SEQ ID NO: 527 - protein, 1345 aa, Streptococcus mutans
  source 1..1345: note = SM1
MKKPYSIGLDIGTNSVGWAVVTDDYKVPAKKMKVLGNTDKSHIKKNLLGALLFDSGNTAEDRRLKRTARRRYTRRRNRILYLQEIFSEEMGKVDDSFFHRLEDSFLVTEDKRGERHPIFGNLEEEVKYHENFPTIYHLRQYLADNPEKVDLRLVYLALAHIIKFRGHFLIEGKFDTRNNDVQKLFQEFLAVYDNTFENSSLQEQNVQVEEILTDKISKSAKKDRVLKLFPNEKSNGRFAEFLKLIVGNQADFKKHFELEEKAPLQLSKDTYEEELEVLLAQIGDNYAELFLSAKKLYDSILLSGILTVTDVSTKAPLSASMIQRYNEHQMDLAQLKQFIRQKLSDKYNEVFSDVSKDGYAGYIDGKTNQEAFYKYLKGLLNKIEGSGYFLDKIEREDFLRKQRTFDNGSIPHQIHLQEMRAIIRRQAEFYPFLADNQDRIEKILTFRIPYYVGPLARGKSDFAWLSRKSADKITPWNFDEIVDKESSVEAFINRMTNYDLYLPNQKVLPKHSLLYEKFTVYNELTKVKYKTEQGKTAFFDANMKQEIFDGVFKVYRKVTKDKLMDFLEKEFDEFRIVDLTGLDKENKAFNASYGTYHDLRKILDKDFLDNSKNEKILEDIVLTLTLFEDREMIRKRLENYSDLLTKEQVKKLERRHYTGWGRLSAELIHGIRNKESRKTLLDYLIDDGNSNRNFMQLINDDALSFKEEIAKAQVIGETDNLNQVVSDIAGSPAIKKGILQSLKIVDELVKIMGHQPENIVVEMARENQFTNQGRRNSQQRLKGLTDSIKEFGSQILKEHPVENSQLQNDRLFLYYLQNGRDMYTGEELDIDYLSQYDIDHIIPQAFIKDNSIDNRVLTSSKENRGKSDDVPSKDVVRKMKSYWSKLLSAKLITQRKFDNLTKAERGGLTDDDKAGFIKRQLVETRQITKHVARILDERFNTETDENNKKIRQVKIVTLKSNLVSNFRKEFELYKVREINDYHHAHDAYLNAVIGKALLGVYPQLEPEFVYGDYPHFHGHKENKATAKKFFYSNIMNFFKKDDVRTDKNGEIIWKKDEYISNIKKVLSYPQVNIVKKVEEQTGGFSKESILPKGNSDKLIPRKTKKFYWDTKKYGGFDSPIVAYSILVIADIEKGKSKKLKTVKALVGVTIMEKMTFERDPIAFLERKGYRNVQEENIIKLPKYSLFKLENGRKRLLASARELQKGNEIVLPNHLGTLLYHAKNIHKVDEPKHLDYVDKHKDEFKELLDVVSNFSKKYTLAEGNLEKIKELYAQNNGEDLKELASSFINLLTFTAIGAPATFKFFDKNIDRKRYTSTTEILNATLIHQSITGLYETRIDLSKLGGD

SEQ ID NO: 528 - protein, 1345 aa, Streptococcus mutans; identical to SEQ ID NO: 527
  source 1..1345: note = SM1

SEQ ID NO: 529 - protein, 1345 aa, Streptococcus mutans
  source 1..1345: note = SM4
MKKPYSIGLDIGTNSVGWAVVTDDYKVPAKKMKVLGNTDKSHIKKNLLGALLFDSGNTAEDRRLKRTARRRYTRRRNRILYLQEIFSEEMDKVDDSFFHRLEDSFLVTEDKRGERHPIFGNLEEEVKYHENFPTIYHLRQYLADNPEKVDLRLVYLALAHIIKFRGHFLIEGKFDTRNNDVQRLFQEFLAVYDNTFENSSLQEQNVQVEEILTDKISKSAKKDRVLKLFPNEKSNGRFAEFLKLIVGNQADFKKHFELEEKAPLQFSKDTYEEELEVLLAQIGDNYAELFLSAKKLYDSILLSGILTVTDVSTKAPLSASMIQRYNEHQMDLAQLKQFIRQKLSDKYNEVFSDVSKDGYAGYIDGKTNQEAFYKYLKGLLNKIEGSGYFLDKIEREDFLRKQRTFDNGSIPHQIHLQEMRAIIRRQAEFYPFLADNQDRIEKILTFRIPYYVGPLARGKSDFAWLSRKSADKITPWNFDEIVDKESSAEAFINRMTNYDLYLPNQKVLPKHSLLYEKFTVYNELTKVKYKTEQGKTAFFDANMKQEIFDGVFKVYRKVTKDKLMDFLEKEFDEFRIVDLTGLDKENKVFNASYGTYHDLCKILDKDFLDNSKNEKILEDIVLTLTLFEDREMIRKRLENYSDLLTKEQVKKLERRHYTGWGRLSAELIHGIRNKESRKTILDYLIDDGNSNRNFMQLINDDALSFKEEIAKAQVIGETDNLNQVVSDIAGSPAIKKGILQSLKIVDELVKIMGHQPENIVVEMARENQFTKQGRRNSQQRLKGLTDSIKEFGSQILKEHPVENSQLQNDRLFLYYLQNGRDMYTGEELDIDYLSQYDIDHIIPQAFIKDNSIDNRVLTSSKENRGKSDDVPSKDVVRKMKSYWSKLLSAKLITQRKFDNLTKAERGGLTDDDKAGFIKRQLVETRQITKHVARILDERFYTETDENNKKIRQVKIVTLKSNLVSNFRKEFELYKVREINDYHHAHDAYLNAVIGKALLGVYPQLEPEFVYGDYPHFHGHKENKATAKKFFYSNIMNFFKKDDVRTDKNGEIIWKKDEHISNIKKVLSYPQVNIVKKVEEQTGGFSKESILPKGNSDKLIPRKTKKFYWDTKKYGGFDSPIVAYSILVIADIEKGKSKKLKTVKALVGVTIMEKMTFERDPVAFLERKGYRNVQEENIIKLPKYSLFKLENGRKRLLASARELQKGNEIVLPNHLGTLLYHAKNIHKVDEPKHLDYVDKHKDEFKELLDVVSNFSKKYTLAEGNLEKIKELYAQNNGEDLKELASSFINLLTFTAIGAPATFKFFDKNIDRKRYTSTTEILNATLIHQSITGLYETRIDLSKLGGD

SEQ ID NO: 530 - protein, 1345 aa, Streptococcus mutans; identical to SEQ ID NO: 529
  source 1..1345: note = SM4

SEQ ID NO: 531 - protein, 1345 aa, Streptococcus mutans
  source 1..1345: note = SM6
MKKPYSIGLDIGTNSVGWAVVTDDYKVPAKKMKVLGNTDKSHIKKNLLGALLFDSGNTAEDRRLKRTARRRYTRRRNRILYLQEIFSEEMGKVDDSFFHRLEDSFLVTEDKRGERHPIFGNLEEEVKYHENFPTIYHLRQYLADNPEKTDLRLVYLALAHIIKFGGHFLIEGKFDTRNNDVQRLFQEFLAVYDNTFENSSLQEQNVQVEEILTDKISKSAKKDRVLKLFPNEKSNGRFAEFLKLIVGNQADFKKHFELEEKAPLQFSKDIYEEELEVLLAQIGDNYAELFLSAKKLYDSILLSGILTVTDVSTKAPLSASMIQRYNEHQMDLAQLKQFIRQKLSDKYNEVFSDVSKDGYAGYIDGKTNQEAFYKYLKGLLNKIEGSGYFLDKIEREDFLRKQRTFDNGSIPHQIHLQEMRAIIRRQAEFYPFLADNQDRIEKILTFRIPYYVGPLARGKSDFAWLSRKSADKITPWNFDEIVDKESSVEAFINRMTNYDLYLPNQKVLPKHSLLYEKFTVYNELTKVKYKTEQGKTAFFDANMKQEIFDGVFKVYRKVTKDKLMDFLEKEFDEFRIVDLTGLDKENKAFNASYGTYHDLRKILDKDFLDNSKNEKILEDIVLTLTLFEDREMIRKRLKNYSDLLTKEQLKKLERRHYTGWGRLSAELIHGIRNKESRKTILDYLIDDGNSNRNFMQLINDDALSFKEEIAKAQVIGETDNLNQVVSDIAGSPAIKKGILQSLKIVDELVKIMGHQPENIVVEMARENQFTNQGRRNSQQRLKGLTDSIKEFGSQILKEHPVENSQLQNDRLFLYYLQNGRDMYTGEELDIDYLSQYDIDHIIPQAFIKDNSIDNRVLTSSKENRGKSDDVPSKNVVRKMKSYWSKLLSAKLITQRKFDNLTKAERGGLTDDDKAGFIKRQLVETRQITKHVARILDERFHTETDENNKKIRQVKIVTLKSNLVSNFRKEFELYKVREINDYHHAHDAYLNAVIGKALLGVYPQLEPEFVYGDYPHFHGHKENKATAKKFFYSNIMNFFKKDDVRTDKNGEIIWKKDEHISNIKKVLSYPQVNIVKKVEEQTGGFSKESILPKGNSDKLIPRKTKKFYWDTKKYGGFDSPIVAYSILVIADIEKGKSKKLKTVKALVGVTIMEKMTFERDPVAFLERKGYRNVQEENIIKLPKYSLFKLENGRKRLLASARELQKGNEIVLPNHLGTLLYHAKNIHKVDEPKHLDYVDKHKDEFKELLDVVSNFSKKYTLAEGNLEKIKELYAQNNGEDLKELASSFINLLTFTAIGAPATFKFFDKNIDRKRYTSTTEILNATLIHQSITGLYETRIDLSKLGGD

SEQ ID NO: 532 - protein, 1345 aa, Streptococcus mutans; identical to SEQ ID NO: 531
  source 1..1345: note = SM6

SEQ ID NO: 533 - protein, 1134 aa, Streptococcus mutans
  source 1..1134: note = ST1
MANGKILGLDIGIASVGVGIIDKETGKIIHVNSRIFPAATADSNVERRGFRQGRRLVRRKKHRKVRLADLFLDSNLLTDFSKVSLNLNPYQLRVKGLNEELSNEELFIALKSIVSRRGISYLDDASEDSGANSSEYGKAVEENRKLLEDRTPGQIQLERFEKYGKVRGDFTVVENGENHRLINVFSTSAYKKEAERILRRQQEFNMRIADEFIEAYLTILTGKRKYYHGPGNEKSRTDYGRFRTDGTTLDNIFGILIGKCTFYPDEYRAAKASYTAQEFNLLNDLNNLTVPTETKKLSEEQKRQIIEHAKTVKTLGAPTLLKYIVKLVGCSADDIKGYRIDKSDKPEIHTFEAYRKMRTMELIKVDDLSRESLDALAHILTLNTEREGIEEAIRDRFTNKEFNQEQINELVLFRKNNSSLFGKGWHNFSLKLMKELIPELYETSEEQMTILTRLGKQRVKKSSNRTNYIDEKELTEEIYNPVVAKSVRQAIKIINLATKKYGVFDNIVIEMARESNEDDEKKAIQNAQKANEDEKKAALLKAAHQFNGKEELPDSIFHGHKELLTKIRLWHQQGEKCLYTGKTIFINDLIHNPYKYEIDHILPLSLSFDDSLANKVLVLSTANQEKGQRTPFQSLDSMDGAWTYREFKSYVKGLKTLSNKKKDYLLTEENIDKIEVKQKFIERNLVDTRYSSRVVLNALQDFYKERKFDTKISVVRGQFTSQLRRKWRIEKTRETYHHHAVDALIIAASSQLNLWKKQNNPLISYKEDQFVDPETGEILSLSDDEYKKLVFKAPYEHFVDTLKSKKFEDSILFSYQVDSKYNRKISGATICGTRKAQLGKDTQEETYVLGKIKDIYSQKGYEDFIKKYKKDKTQFLMYHKDPQTFEKVIEEILKTYPDKELNEKGKEVSCNPFEKYRQENGPVRKYSKKGNGPEIKSLKYYDEVLGKNIDITPKNSLNKVVLRSLNPWRTDVYFNHETRKYEFLGLKYSDLRYLKGEHRYGILIGDYKKIKDKEGIEKESEFKFTLYKNDLILIKDTAKGKEELFRFWSRTGKDNAKTFEKNKIELKPYSKSQFEKGEDTNVLGKLYASSNQLQKSFGTLENLSIYKVRTDVLGNKYFIKKEGDKPQLNFKKKL

SEQ ID NO: 534 - protein, 1134 aa, Streptococcus mutans; identical to SEQ ID NO: 533
  source 1..1134: note = ST1

SEQ ID NO: 535 - protein, 1350 aa, Streptococcus mutans
  source 1..1350: note = ST6
MKKPYSIGLDIGTNSVGWAVVTDDYKVPAKKMKVLGNTDKSHIEKNLLGALLFDSGNTAEDRRLKRTARRRYTRRRNRILYLQEIFSEEMGKVDDSFFHRLEDSFLVTEDKRGERHPIFGNLEEEVKYHENFPTIYHLRQYLADNPEKVDLRLVYLALAHIIKFRGHFLIEGKFDTRNNDVQRLFQEFLAVYDNTFENSSLQEQNVQVEEILTDKISKSAKKDRVLKLFPNEKSNGRFAEFLKLIVGNQADFKKHFELEEKAPLQFSKDTYEEELEVLLAQIGDNYAELFLSAKKLYDSILLSGILTVTDVSTKAPLSASMIQRYNEHQMDLTQLKQFIRQKLSDKYNEVFSDVSKDGYAGYIDGKTNQEAFYKYLKGLLNKIEGSGYFLDKIEREDFLRKQRTFDNGSIPHQIHLQEMRAIIRRQAEFYSFLADNQDRIEKILTFRIPYYVGPLARGKSDFAWLSRKSADKITPWNFDEIVDKESSAEAFINRMTNYDLYLPNQKVLPKHSLLYEKFTVYNELTKVKYKTEQGKTAFFDANMKQEIFDGVFKVYRKVTKDKLMDFLEKEFDEFRIVDLTGLDKENKAFNASYGTYHDLRKILDKDFLDNSKNEKILEDIVLTLTLFEDREMIRKRLENYSDLLTKEQVKKLERRHYTGWGRLSAELIHGIRNKESRKTILDYLIDDGNSNRNFMQLINDDALSFKEEIAKAQVIGETDNLNQVVSDIAGSPAIKKGILQSLKIVDELVKIMGHQPENIVVEMARENQFTNQGRRNSQQRLKGLTDSIKEFGSQILKEHPVENSQLQNDRLFLYYLQNGRDMYTGEELDIDYLSQYDIDHIIPQAFIKDNSIDNRVLTSSKENRGKSDDVPSEDVVNRMRPFWNKLLSSGLISQRKYNNLTKKELTLDDKAGFIKRQLVETRQITKHVARMLDERFNKEFDDNNKRIRKVKIVTLKSNLVSSFRKEFELYKVREINDYHHAHDAYLNAVVVKALLVKYSKLEPEFVYGEYPKYNSYRERKTATQKMFFYSNIMNMFKSKVKLADDQIVERPMIEVNDETGEIAWDKTKHITTVKKVLSYPQVNIVKKVEEQTIGQNGGLFDDNPKSPLEVIPSKLVPLKKALNPEKYGGYQKPTTAYPILLIVDTKQLIPISVMDKKRFEQNPVKFLKDKGYQQIEKNNFVKLPKYTLVDIGNGIKRLWASSKEVHKGNQLVVSKKSQDLLYHAHHLDNDYSNEYVKNHYQQFDILFNEITSFSKKCKLGKEHIQKIEEAYSKERDSASIEELADGFIKLLGFTQLGATSPFSFLGIKLNQKQYTGKKDYLLPCMEATLIHQSITGLYETRIDLSKLGGD

SEQ ID NO: 536 - protein, 1350 aa, Streptococcus mutans; identical to SEQ ID NO: 535
  source 1..1350: note = ST6

SEQ ID NO: 537 - protein, 1125 aa, Streptococcus mutans
  source 1..1125: note = U2A
MTNGKILGLDIGIASVGVGIINAKTGNVEHASSRIFPAANADNNVERRSARGGRRLIRRKKHRLKRVEDLFEKYNIDTDFSNLNLNPYQLRVKGLNEQLSNEELFAILKNIAKRRGISYLDDAEDDSVGSSDYAKAIDENRKLLKKQTPGEIQLKRLEKYGQLRGNFTIQDENGEYHRLINVFSTSDYVKEARRILETQSYYNKFITESFVEDYIKILQGKRKYYVGPGNEKSRTDYGIYRTDGETLDNLFGILIGKCGFYPEEYRAAKASYTAQEYNFLNDLNNLTVPTETKKLSTEQKYQLVDFAKTASTLGAAKLLKEIAKLVGCQVEEIKGYRLDNKDKPDLHTFEPFRKLKSNLTTIAVENLSITTLDTLAHILTLNTEREGIEEAIQKELPNIFSDEQITEIIAVRKKNSQIFGKGWHSFSIKLMKELIPELYETSEEQMTILTRLKKVKTNSKITNRTKYINEEEITDEIYNPVVSKSIRQTVKIINATIKKYGAFDQIIIEMPRESNEEDERKFIADLQKSNAKEKDDAMKQAALLYNGKDELPHDVFHGHKELATKIRLWYQQGERCLYSGKHIDIHDLIHNQHMFEIDHVLPLSLSFDDSLANKVLVYSWANQEKGQRTPFQALPQMASAWSFRELRDYISKQKGISKKKRDYLLTEQDINKVEVKQKFIERNLVDTRYVSRVVLNTLQDALKVMNKETKISVIRGQFTSQLRRQWRIDKSRETYHHHAVDALIIAASSQLRLWKKQNNPMFAEDKHGQKINLDTGEVLSDDAYKELVYQAPYQGFVNTISSKSFEDEILFSYQVDSKVNRKISDATIYATRQAQLGKDKKEETYVLGKIKDIYSQAGYDAFRKKYDKDKAVFLMYQKDPETWEKVIEVILRDYKELDDKGKEIGNPFERYKVKHGFVRKYSRKNKGTEIKSLKYYDNKLGNHIDITPNNSKHSVVLQSINPWRADLYFNPETTKYELMGLKYADLSFEKGTGKYSISREKYDEIKEREGISSKSEFKFTLYKNDLILVKDIGNHKELIARFNSKNDTSKHYVELKPWNKAKFDSEEELIPAFGKVAKSGQFIKGLNKPDLSIYKVKTDILGHKYYIKKEGDKPKLNFENKIKNK

SEQ ID NO: 538 - protein, 1125 aa, Streptococcus mutans; identical to SEQ ID NO: 537
  source 1..1125: note = U2A

SEQ ID NO: 539 - protein, 1345 aa, Streptococcus mutans
  source 1..1345: note = UA159
MKKPYSIGLDIGTNSVGWAVVTDDYKVPAKKMKVLGNTDKSHIEKNLLGALLFDSGNTAEDRRLKRTARRRYTRRRNRILYLQEIFSEEMGKVDDSFFHRLEDSFLVTEDKRGERHPIFGNLEEEVKYHENFPTIYHLRQYLADNPEKVDLRLVYLALAHIIKFRGHFLIEGKFDTRNNDVQRLFQEFLAVYDNTFENSSLQEQNVQVEEILTDKISKSAKKDRVLKLFPNEKSNGRFAEFLKLIVGNQADFKKHFELEEKAPLQFSKDTYEEELEVLLAQIGDNYAELFLSAKKLYDSILLSGILTVTDVGTKAPLSASMIQRYNEHQMDLAQLKQFIRQKLSDKYNEVFSDVSKDGYAGYIDGKTNQEAFYKYLKGLLNKIEGSGYFLDKIEREDFLRKQRTFDNGSIPHQIHLQEMRAIIRRQAEFYPFLADNQDRIEKLLTFRIPYYVGPLARGKSDFAWLSRKSADKITPWNFDEIVDKESSAEAFINRMTNYDLYLPNQKVLPKHSLLYEKFTVYNELTKVKYKTEQGKTAFFDANMKQEIFDGVFKVYRKVTKDKLMDFLEKEFDEFRIVDLTGLDKENKVFNASYGTYHDLCKILDKDFLDNSKNEKILEDIVLTLTLFEDREMIRKRLENYSDLLTKEQVKKLERRHYTGWGRLSAELIHGIRNKESRKTILDYLIDDGNSNRNFMQLINDDALSFKEEIAKAQVIGETDNLNQVVSDIAGSPAIKKGILQSLKIVDELVKIMGHQPENIVVEMARENQFTNQGRRNSQQRLKGLTDSIKEFGSQILKEHPVENSQLQNDRLFLYYLQNGRDMYTGEELDIDYLSQYDIDHIIPQAFIKDNSIDNRVLTSSKENRGKSDDVPSKDVVRKMKSYWSKLLSAKLITQRKFDNLTKAERGGLTDDDKAGFIKRQLVETRQITKHVARILDERFNTETDENNKKIRQVKIVTLKSNLVSNFRKEFELYKVREINDYHHAHDAYLNAVIGKALLGVYPQLEPEFVYGDYPHFHGHKENKATAKKFFYSNIMNFFKKDDVRTDKNGEIIWKKDEHISNIKKVLSYPQVNIVKKVEEQTGGFSKESILPKGNSDKLIPRKTKKFYWDTKKYGGFDSPIVAYSILVIADIEKGKSKKLKTVKALVGVTIMEKMTFERDPVAFLERKGYRNVQEENIIKLPKYSLFKLENGRKRLLASARELQKGNEIVLPNHLGTLLYHAKNIHKVDEPKHLDYVDKHKDEFKELLDVVSNFSKKYTLAEGNLEKIKELYAQNNGEDLKELASSFINLLTFTAIGAPATFKFFDKNIDRKRYTSTTEILNATLIHQSITGLYETRIDLNKLGGD

SEQ ID NO: 540 - protein, 1345 aa, Streptococcus mutans; identical to SEQ ID NO: 464
  source 1..1345: note = W6

SEQ ID NO: 541 - protein, 1121 aa, Streptococcus oralis
  source 1..1121: note = SK1074
MNGLVLGLDIGIASVGVGILEKNSGKIIHANSRLFPAATADNNVERRKNRQARRLNRRKKHRGVRFQDLFEDYGLLTDFSKVSINLNPYRLRVDGLNQQLTNEELFIALKNIVKRRGISYLDDASEDGGAVSSDYGKAVEENRKLLAEQTPGQIQLERFEKYGQVRGDFTVVENGEKCRLINVFSTSAYRKEAEKILRKQQEFNNQITDEFIEDYLKILTGKRKYYHGPGNEKSRTDYGRFRTDGTTLDNIFGVLIGKCTFYPNEYRASKSSYTAQEFNLLNDLNNLTVPTETKKLSEEQKKVIVEYAKEAKTLGASTLLKYIVKMIDASVDQISGYRVDVNNKPEMHTFEVYRKMQSLETISVGELSRNVLDELAHILTLNTEREGIEEAINSKLMGVFSQDQVLELVQFRKNNSSLFSKGWHNFSLKLMMELIPELYETSEEQMTILTRLGKQKSKETSKRTKYIDEKELTEEIYNPVVAKSVRQAIKIINEATKKHGIFDNIVIEMARENNEEDAKKDYIKRQKANQDEKNAAMEKAAFQYNGKKELPGNIFNGHKELATKIRLWHQQGEKCLYTGKTIPISDLIHNQYKYEIDHILPLSLSFDDSLSNKVLVHATANQEKGQRTPFQALDSMDDAWSYREFKSYVKDLKSLSNKKKDYLLTEEDISKIEVKQKFIERNLVDTRYSSRVVLNALQDFYKSHQFDTTISVVRGQFTSQLRRKWGLEKSRETYHHHAVDALIIAASSQLRLWKKQNNPLITYKEGQFVDSQTGEIISLTDDEYKELVFKAPYDHFVDTLHSKTFEDGILFSYQVDSKYNRKISDATIYATRKAKLDKDKSEETYVLGKIKDIYSQAGYDAFIKIYNKDKRKFLMYHKDPQTFEKVIEEILRTYPSKERNDKNKEVPCNPFEKYRQENGPIRKYSKKGNGPEIKCLKYYDNKLGNYIDISPDGSDNQVVLQSLKPWRTDVYFNHQTKEYELMGLKYSDLSFEKGSGKYSISNEKYNSIKRIEGVNEQSEFKFTLYKNDLILIKDSENNEQKLFRFNSRNDTAKHYVELKPYDKARFDGQQELITILGNVAKGGQCLKGLNKSNISIFKVKTDVLGKKHIIKKEGDEPKLKF

SEQ ID NO: 542 - protein, 1373 aa, Streptococcus oralis
  source 1..1373: note = SK304
MENKNYSIGLDIGTNSVGWAVITDDYKVPSKKMKVLGNTDKRFIKKNLIGALLFDEGTTAEARRLKRTARRRYTRRKNRLRYLQEIFAEEMSKVDSSFFHRLDDSFLIPEDKKGSKYPIFATLIEEKEYHKQFPTIYHLRKQLADSKEKTDLRLIYLALAHMIKYRGHFLYEDTFDIKNNDIQKIFNEFISIYNNTFEGNSLSGQNVQVEAIFTDKISKSAKRERVLKLFPDEKSTGLFSEFLKLIVGNQADFKKHFDLEEKAPLQFSRDTYDEDLENLLGQIGDDFADLFVAAKKLYDAILLSGILTVTDPSTKAPLSASMIERYENHQKDLATLKQFIKTNLPEKYDEVFSDQSKDGYAGYIDGKTTQESFYKYIKNLLSKFEGADYFLEKIEREDFLRKQRTFDNGSIPHQIHLQEMNAILRRQGEHYPFLKENKEKIEKILTFRIPYYVGPLARGNRDFAWLTRNSDQAIRPWNFEEIVDKASSAESFINKMTNYDLYLPEEKVLPKHSLLYETFAVYNELTKVKFIAEGLRDYQFLDSRQKKDIFYTLFKAEDKRKVTEKDIIQYLHTVDGYDGIELKGIEKQFNASLSTYHDLLKIIKDKEFMDDPNNEEILENIVHTLTIFEDREMIKQRLAQYDSLFDEKVIKALTRRHYTGWGKLSSKLINGIRDKQTGKTILDYLMDDGYNNRNFMQLINDDELSFKEIIKKAQVVGKTDDVKQVVQELPGSPAIKKGILQSIKLVDELVKVMGHEPESIVIEMARENQTTARGKKNSQQRYKRIEDSLKILASGLNAKILKEHPTDNIQLQNDRLFLYYLQNGRDMYTGKPLDINQLSSYDIDHIVPQAFIKDDSLDNRVLTSLKDNRGKSDNVPSLEVVEKMKTFWQQLLDSKLISYRKFNNLTKAERGGLDERDKVGFIKRQLVETRQITKHVAQILDARYNTEVNEKDKKNRTVKIITLKSNLVSNFRKEFRLYKIREINDYHHAHDAYLNAVVAKAILKKYPKLEPEFVYGDYQKYDLKRYISRSKDPKEIEKATEKYFFYSNLLNFFKEEVHYADGTIVKRENIEYSKDTGEIAWNKEKDFATIKKVLSLPQVNIVKKREVQTGGFSKESILPKGNSDKLIPRKTKDILWDTTKYGGFDSPVIAYSILLIADIEKGKAKRLKTVKTLVGITIMEKATFEKSPIAFLENKGYHNVRKENILCLPKYSLFELKNGRRRMLASAKELQKGNEIVLPVHLTTLLYHAKNIHRLDEPEHLEYIQKHRNEFKGLLNLVSEFSQKYVLADANLEKIKNLYADNEQADIEILANSFINLLTFTALGAPAAFKFFGKDVDRKRYTTVSEILNATLIHQSITGLYETRIDLSKLGED

SEQ ID NO: 543 - protein, 1134 aa, Streptococcus oralis
  source 1..1134: note = SK313
MNGLVLGLDIGIASVGVGILEKNSGKIVHASSRIFPAATADNNVERRKNRQARRLHRRKKHRGARLKDLFEYYGLLTDFSKVSINLNPYRLRVDGLDQQLTNEELFIALKNIVKRRGISYLDDASEDGGTVSSDYGKAVEENRKLLAEQTPGQIQLERFEKYGQLRGDFTVVENSEKCRLINVFSTSAYKKEAERILRKQQEFNNQITDEFIEDYLKILTGKRKYYHGPGNEKSRTDYGRFRTDGATLDNIFGILIGKCTFYPNEYRASKASYTAQEFNLLNDLNNLTVPTETKKLSEEQKKTIIEYAKSAKTLGASTLLKYIAKMIDASVDQIRGYRVDVNNKPEMHTFEVYRKMQSLETISVGELSRNILDELAHILTLNTEREGIEEAINTKLRDSFSQDQVLELVQFRKNNSSLFSKGWHNFSLKLMMELIPELYETSEEQMTILTRLGKQKSKETSKRTKYIDEKEVTEEIYNPVVAKSVRQAIKIINEATKKHGIFDNIVIEMARENNEEDAKKDYIKRQKANQDEKYAAMEKAAFQYNGKKELPDNIFHGHKELATKIRLWHQQGEKCLYTGKSIPISDLIHNQYKYEIDHILPLSLSFDDSLSNKVLVLATANQEKGQRTPFQALDSMDDAWSYREFKSYVKESKLLGNKKKEYLLTEEDISKIEVKQKFIERNLVDTRYSSRVVLNALQDFYKNHNFDTTISVVRGQFTSQLRRKWGLEKSRETYHHHAVDALIIAASSQLRLWKKQNNPLIAYKEGQFVDSQTGEIISLTDDEYKELVFKAPYDHFVDTLSSKTFEDSILFSYQVDSKFNRKISDATIYATRKAKLDKEKKEYTYTLGKIKDIYSLGTKTPSKTGFYKFLDLYNKDKSQFLMFQKDRKTWDEVIEKIMEQYRPFKEYDKAGKLVDFNPFEKYRQENGPIRKYSKKGNGPEIKSLKYYDILLGKHKNITPEGSRNTVALLSLNPWRTDVYYNMETKKYEFLGLKYADLPFEEGGAYGISTETYNELREKEGIGKNSEFKFTLYKNDLILIKDTETNCQQFFRFWSRTGKDNPKSFEKHKIELKPYEKAKFEKGEELEVLGKVPPSSNQFQKNMQIENLSIYKVKTDVLGNKHFIKKEGDKPKLKF

SEQ ID NO: 544 - protein, 1371 aa, Streptococcus oralis
  source 1..1371: note = SK610
MENKNYSIGLDIGTNSVGWSVITDDYKVPSKKMKVLGNTDKRFIKKNLIGALLFDEGTTAEARRLKRTARRRYTRRKNRLRYLQEIFAEEMSKVDSSFFHRLDDSFLIPEDKRGSKYPIFATLAEEKEYHKQFPTIYHLRKQLADSKEKTDLRLIYLALAHMIKYRGHFLYEDTFDIKNNDIQKIFSEFISIYDNTFEGSSLSGQNAQVEAIFTDKISKSAKRERVLKLFPDEKSTGLFSEFLKLIVGNQADFKKHFDLGEKAPLQFSKDTYDEDLENLLGQIGDDFADLFLVAKKLYDAILLSGILTVTDPSTKAPLSASMIERYENHQKDLAVLKQFIKNNLPEKYDEVFSDQSKDGYAGYIDGKTTQEAFYKYIKNLLSKFEGTDYFLEKIEREDFLRKQRTFDNGSIPHQIHLQEMNAILRRQGEHYPFLKDNKEKIEKILTFRIPYYVGPLARGNRDFAWLTRNSDEAIRPWNFEEIVDKASSAEDFINKMTNYDLYLPEEKVLPKHSLLYETFAVYNELTKVKFIAEGLRDYQFLDSGQKKQIVTQLFKEKRKVTEKDIIQFLHNVDGYDGIELKGIEKQFNASLSTYHDLLKIIKDKEFMDDSKNEEILENIVHTLTIFEDREMIKQRLAQYDSLFDEKVIKALIRRHYTGWGKLSAKLIDGICDKQTGNTILDYLIDDGKNNRNFMQLINDDGLSFKEITQKAQVVGKTDDVKQVVQELPGSPAIKKGILQSIKIVDELVKVMGHTPESIVIEMARENQTTARGKKNSQQRYKRIEDALKNLASGLDSNILKEHPTNNIQLQNDRLFLYYLQNGRDMYTGKPLDINQLSSYDIDHIVPQAFIKDDSLDNRVLTSLKDNRGKSDNVPSIEVVQKRKAFWQQLLDSKLISERKFNNLTKAERGGLDERDKVGFIKRQLVETRQITKHVAQILDARFNKEVNEKDKKNRTVKIITLKSNLVSNFRKEFRLYKVREINDYHHAHDAYLNAVVAKAILKKYPKLEPEFVYGDYQKYDLKRYISRSRNPKEVEKATEKYFFYSNLLNFFKEEVHYADGTIVKRENIEYSKDTGEIAWNKEKDFATIKKVLSYPQVNIVKKREVQTGGFSKESILPKGNSDKLIPRKTKDILWETTKYGGFDSPVIAYSILLIADIEKGKAKKLKTVKTLVGITIMEKAAFEENPITFLENKGYHNVRKENILCLPKYSLFELENGRRRLLASAKELQKGNEIVLPVYLTTLLYHSKNVHKLDEPEHLEYIQKHRNEFKDLLNLVSEFSQKYVLADANLEKIQNLYADNEQADIEILANSFINLLTFTALGAPAAFKFFGKDIDRKRYTTVSEILNATLIHQSITGLYETRIDLSKLGED

SEQ ID NO: 545 - protein, 1140 aa, Streptococcus parasanguinis
  source 1..1140: note = F0449
MNGLVLGLDIGIASVGVGILKKDIGEIIHTNSRLFSAATADSNIERRGHRGGKRLTRRKKHRSIRLHDLFEDFGLLTDFSKVSINLNPYQLRVQGLDNQLTNEELFIALKNIVKRRGISYLDDASEDGGTVSSDYGKAVEENRKLLAEQTPGQIQLDRFEKYGQVRGDFNVVENGEKRRLINVFTTSAYSKEAERILRKQQEFNKKITDEFIEDYLTILTGKRKYYHGPGNEKSRTDYGRYTTKKDPEGKYITLDNIFGILIGKCTFYPDEYRASKASYTAQEFNLLNDLNNLTVPTETKKLSEEQKKTIIKYAKTAKTLGASTLLKYIAKLIGASVDQIHGYRIDPNKKPEMHTFETYRKMQSLETISVEELPRKVLDELAHILTLNTEREGIEEAINATLKDTFSQDQVLELVQFRKNNSSLFSKGWHSFSLKLMMELIPELYETSEEQMTILTRLGKQKSKETSKRTKYIDEKELTEEIYNPVVAKSVRQAIKIINEATKKYGIFDNIVIEMARENNEEDAKKEYIKRQKANLDEKNAAMEKAAFQYNGKKELPDNVFHGHKELATKIRLWHQQGEKCLYTGKNIPISDLIQNQYKYEIDHILPLSLSFDDSLSNKVLVLATANQEKGQRTPFQALDSMDDAWSYREFKSYVKDSKLLGNKKKEYLLTEEDISKIEVKQKFIERNLVDTRYSSRVVLNALQDFYKEHQFDTTISVVRGQFTSQLRRKWGLEKSRETYHHHAVDALIIAASSQLRLWKKQNNPLISYTEGQFVDQVTGEIISLSDDEYKELVFKAPYDHFVDTLKSKKFEDSILFSYQVDSKYNRKISDATIYATRKAKLDKENKEYTYTLGKIKDIYALGTKSPSKTGFYKFLDLYNKDKSQFLMFQKDRKTWDEVIEKIIEQYRPFKEYDENGKEVDFNPFEKYRIENGPIRKYSKKGNGPEIKSLKYYDNLLGKFVDITPSESKNPVALLSLNPWRTDVYYNTETSKYEFLGLKYADLCFEKGGAYGISEVKYNKIREKEGIGKESEFKFTLYKNDLILIKDTETNCQQIFRFWSRTGKDNPKSFEKHKIELKPYEKARFEKGEELEVLGKVPPSSNQLQKNMQIENLSIYKVKTDVLGNKHFIKKEGEEPKLKF

SEQ ID NO: 546 - protein, 1130 aa, Streptococcus pasteurianus
MTNGKILGLDIGIASVGVGIIEAKTGKVVHANSRLFSAANAENNAERRGFRGSRRLNRRKKHRVKRVRDLFEKYGIVTDFRNLNLNPYELRVKGLTEQLKNEELFAALRTISKRRGISYLDDAEDDSTGSTDYAKSIDENRRLLKNKTPGQIQLERLEKYGQLRGNFTVYDENGEAHRLINVFSTSDYEKEARKILETQADYNKKITAEFIDDYVEILTQKRKYYHGPGNEKSRTDYGRFRTDGTTLENIFGILIGKCNFYPDEYRASKASYTAQEYNFLNDLNNLKVSTETGKLSTEQKESLVEFAKNTATLGPAKLLKEIAKILDCKVDEIKGYREDDKGKPDLHTFEPYRKLKFNLESINIDDLSREVIDKLADILTLNTEREGIEDAIKRNLPNQFTEEQISEIIKVRKSQSTAFNKGWHSFSAKLMNELIPELYATSDEQMTILTRLEKFKVNKKSSKNTKTIDEKEVTDEIYNPVVAKSVRQTIKIINAAVKKYGDFDKIVIEMPRDKNADDEKKFIDKRNKENKKEKDDALKRAAYLYNSSDKLPDEVFHGNKQLETKIRLWYQQGERCLYSGKPISIQELVHNSNNFEIDHILPLSLSFDDSLANKVLVYAWTNQEKGQKTPYQVIDSMDAAWSFREMKDYVLKQKGLGKKKRDYLLTTENIDKIEVKKKFIERNLVDTRYASRVVLNSLQSALRELGKDTKVSVVRGQFTSQLRRKWKIDKSRETYHHHAVDALIIAASSQLKLWEKQDNPMFVDYGKNQVVDKQTGEILSVSDDEYKELVFQPPYQGFVNTISSKGFEDEILFSYQVDSKYNRKVSDATIYSTRKAKIGKDKKEETYVLGKIKDIYSQNGFDTFIKKYNKDKTQFLMYQKDSLTWENVIEVILRDYPTTKKSEDGKNDVKCNPFEEYRRENGLICKYSKKGKGTPIKSLKYYDKKLGNCIDITPEESRNKVILQSINPWRADVYFNPETLKYELMGLKYSDLSFEKGTGNYHISQEKYDAIKEKEGIGKKSEFKFTLYRNDLILIKDIASGEQEIYRFLSRTMPNVNHYVELKPYDKEKFDNVQELVEALGEADKVGRCIKGLNKPNISIYKVRTDVLGNKYFVKKKGDKPKLDFKNNKK

SEQ ID NO: 547 - protein, 1374 aa, Streptococcus pseudoporcinus
  source 1..1374: note = LQ 940-04
MKKRYSYSIGLDIGTNSVGWAVINEDYKVPAKKMTVFGNTDRKTIKKNLLGTVLFDSGETAQARRLKRTNRRRYTRRRYRLCQLQNIFATEMVKVDDTFFQRLSESFFYYQDKAFDKHPIFGNSKEERAYHKTYPTIYHLRKDLADRDQKADLRLIYLALSHIIKFRGHFLIEGKLNSENTDVQKLFIALVTVYNLLFEEEPIAGETCDAKALLTAKTSKSKRLESLISEFPGQKKNGLFGNLLALALGLRPNFKSNFGLSEDAKLQITKDTYEEELDNLLAEIGDHYADLFLAAKNLSDAILLSDILTLSDENTRAPLSASMIKRYEEHQEDLALLKKLVKEQMPEKYWEIFSNAKKNGYAGYIEGKVSQEDFYRYIKPILSRLKGGDEFLAKIDRDDFLRKQRTFDNGSIPHQIHLKELHAILRRQEKYYPFLAEQKEKIEQLLCFRIPYYVGPLAKGGNSSFAWLKRRSDEPITPWNFKDVVDEEASAQAFIEGMTNYDTYLPEEKVLPKHSPLYEMFTVYNELTKVKYIAENMTKPLYLSAEQKEAIIDHLFKQTRKVTVKDLKEKYFSQIEGLENVDVTGVEGAFNASLGTYNDLLKIIKDKAFLDDEANAEILEEIVLILTLFQDEKLIEKRLAKYANLFEKSVLKKLRKRHYRGWGRLSRQLIDGMKDKASGKTILDFLKADDFANRNFIQLINDSSLDFEKLIDDAQKKAIKRESLTEAVANLAGSPAIKKGILQSLKVVDEIVKVMGHNPDNIVIEMSRENQTTAQGLKNARQRLKKIKEVHKKTGSRILEDNSERITNLTLQDNRLYLYLLQDGKDMYTGQDLDINNLSQYDIDHIIPQSFIKDNSIDNLVLTTQKANRGKSDNVPSIEVVRDMKDRVWRRQLANGAISRQKFDHLTKAERGGLADSDKARFLRRQLVETRQITKHVAQLLDSRFNSKSNQNKKLARNVKIITLKSKIVSDFRKDFGLYKLREVNNYHHAHDAYLNAVVGTALLKKYPKLEAEFVYGDYKHFDLVKLISKSDPSLGKATAKVFFYSNIMNFFKEELSLADGTLMKRPVIETNTETGEVVWDKVKDFKTIRKVLSYPQVNIVKKTEIQSGAFSKESVLSKGNSDKLIERKKGWDPKKYGGFDSPNTAYSIFVVAKVAKRKAQKLKTVKEIVGITIMEQAEYEKDNIAFLEKKGYQDIQEKLLIKLPKYSLFELENGRRRLLASANEFQKGNELALSGKYMKFLYLASRYDKLSSKIESEQQKKLFVEQHLHYFDEILDIVVKHATCYIKAENNLKKIISLYKKKEAYSINEQALNMLNLFIFTSLGAPSTFVFFDETIDRKRYTTSSDVLNGILIQQSITGLYETRIDLSRFGGD

SEQ ID NO: 548 - protein, 1368 aa, Streptococcus pyogenes
  source 1..1368: note = MGAS10270
MDKKYSIGLDIGTNSVGWAVITDDYKVPSKKFKVLGNTDRHSIKKNLIGALLFDSGETAEATRLKRTARRRYTRRKNRICYLQEIFSNEMAKVDDSFFHRLEESFLVEEDKKHERHPIFGNIVDEVAYHEKYPTIYHLRKKLVDSTDKADLRLIYLALAHMIKFRGHFLIEGDLNPDNSDVDKLFIQLVQTYNQLFEENPINASGVDAKAILSARLSKSRRLENLIAQLPGEKKNGLFGNLIALSLGLTPNFKSNFDLAEDAKLQLSKDTYDDDLDNLLAQIGDQYADLFLAAKNLSDAILLSDILRLNSEITKAPLSASMIKRYDEHHQDLTLLKALVRQQLPEKYKEIFFDQSKNGYAGYIDGGASQEEFYKFIKPILEKMDGTEELLAKLNREDLLRKQRTFDNGSIPHQIHLGELHAILRRQEDFYPFLKDNREKIEKILTFRIPYYVGPLARGNSRFAWMTRKSEETITPWNFEEVVDKGASAQSFIERMTNFDKNLPNEKVLPKHSLLYEYFTVYNELTKVKYVTEGMRKPAFLSGEQKKAIVDLLFKTNRKVTVKQLKEDYFKKIECFDSVEISGVEDRFNASLGTYHDLLKIIKDKDFLDNEENEDILEDIVLTLTLFEDREMIEERLKTYAHLFDDKVMKQLKRRRYTGWGRLSRKLINGIRDKQSGKTILDFLKSDGFANRNFMQLIHDDSLTFKEDIQKAQVSGQGDSLHEHIANLAGSPAIKKGILQTVKVVDELVKVMGRHKPENIVIEMARENQTTQKGQKNSRERMKRIEEGIKELGSQILKEHPVENTQLQNEKLYLYYLQNGRDMYVDQELDINRLSDYDVDHIVPQSFIKDDSIDNKVLTRSDKNRGKSDNVPSEEVVKKMKNYWRQLLNAKLITQRKFDNLTKAERGGLSELDKAGFIKRQLVETRQITKHVAQILDSRMNTKYDENDKLIREVKVITLKSKLVSDFRKDFQFYKVREINNYHHAHDAYLNAVVGTALIKKYPKLESEFVYGDYKVYDVRKMIAKSEQEIGKATAKYFFYSNIMNFFKTEITLANGEIRKRPLIETNGETGEIVWDKGRDFATVRKVLSMPQVNIVKKTEVQTGGFSKESILPKRNSDKLIARKKDWDPKKYGGFDSPTVAYSVLVVAKVEKGKSKKLKSVKELLGLTIMERSSFEKNPIDFLEAKGYKEVKKDLIIKLPKYSLFELENGRKRMLASAGELQKGNELALPSKYVNFLYLASHYEKLKGSPEDNEQKQLFVEQHKHYLDEIIEQISEFSKRVILADANLDKVLSAYNKHRDKPIREQAENIIHLFTLTNLGAPAAFKYFDTTIDRKRYTSTKEVLDATLIHQSITGLYETRIDLSQLGGD

SEQ ID NO: 549 - protein, 1371 aa, Streptococcus pyogenes
MDKKYSIGLDIGTNSVGWAVITDDYKVPSKKFKVLGNTDRHSIKKNLIGALLFDSGETAEATRLKRTARRRYTRRKNRICYLQEIFSNEMAKVDDSFFHRLEESFLVEEDKKHERHPIFGNIVDEVAYHEKYPTIYHLRKKLADSTDKADLRLIYLALAHMIKFRGHFLIEGDLNPDNSDVDKLFIQLVQTYNQLFEENPINASRVDAKAILSARLSKSRRLENLIAQLPGEKKNGLFGNLIALSLGLTPNFKSNFDLAEDAKLQLSKDTYDDDLDNLLAQIGDQYADLFLAAKNLSDATLLSDILRVNSEITKAPLSASMIKRYDEHHQDLTLLKALVRQQLPEKYKEIFFDQSKNGYAGYIDGGASQEEFYKFIKPILEKMDGTEELLAKLNREDLLRKQRTFDNGSIPHQIHLGELHAILRRQEDFYPFLKDNREKIEKILTFRIPYYVGPLARGNSRFAWMTRKSEETITPWNFEEVVDKGASAQSFIERMTNFDKNLPNEKVLPKHSLLYEYFTVYNELTKVKYVTEGMRKPAFLSGEQKKAIVDLLFKTNRKVTVKQLKEDYFKKIECFDSVEISGVEDRFNASLGTYHDLLKIIKDKDFLDNEENEDILEDIVLTLTLFEDKEMIEERLKTYAHLFDDKVMKQLKRRHYTGWGRLSRKLINGIRDKQSGKTILDFLKSDGFANRNFIQLIHDDSLTFKEAIQKAQVSGQGHSLHEQIANLAGSPAIKKGILQSVKVVDELVKVMGHKPENIVIEMARENQTTQKGQKNSRERMKRIEEGIKELGSQILKEHPVENTQLQNEKLYLYYLQNGRDMYVDQELDINRLSDYDVDHIVPQSFIKDDSIDNKVLTRSDKNRGKSDDVPSEEVVKKMKNYWRQLLNAKLITQRKFDNLTKAERGGLSELDKAGFIKRQLVETRQITKHVAQILDSRMNTKYDENDKLIREVKVITLKSKLVSDFRKDFQFYKVREINNYHHAHDAYLNAVVGTALIKKYPKLESEFVYGDYKVYDVRKMIAKSEQEIGKATAKRFFYSNIMNFFKTEITLANGEIRKRPLIETNEETGEIVWDKGRDFATVRKVLSMPQVNIVKKTEVQTGALTNESIYARGSFDKLISRKHRFESSKYGGFGSPTVTYSVLVVAKSKVQDGKVKKIKTGKELIGITLLDKLVFEKNPLKFIEDKGYGNVQIDKCIKLPKYSLFEFENGTRRMLASVMANNNSRGDLQKANEMFLPAKLVTLLYHAHKIESSKELEHEAYILDHYNDLYQLLSYIERFASLYVDVEKNISKVKELFSNIESYSISEICSSVINLLTLTASGAPADFKFLGTTIPRKRYGSPQSILSSTLIHQSITGLYETRIDLSQLGSD

SEQ ID NO: 550 - protein, 1367 aa, Streptococcus pyogenes
MDKKYSIGLDIGTNSVGWAVITDDYKVPSKKFKVLGNTDRHSIKKNLIGALLFGSGETAEATRLKRTARRRYTRRKNRICYLQEIFSNEMAKVDDSFFHRLEESFLVEEDKKHERHPIFGNIVDEVAYHEKYPTIYHLRKKLADSTDKADLRLIYLALAHMIKFRGHFLIEGDLNPDNSDVDKLFIQLVQIYNQLFEENPINASRVDAKAILSARLSKSRRLENLIAQLPGEKRNGLFGNLIALSLGLTPNFKSNFDLAEDAKLQLSKDTYDDDLDNLLAQIGDQYADLFLAAKNLSDAILLSDILRVNSEITKAPLSASMIKRYDEHHQDLTLLKALVRQQLPEKYKEIFFDQSKNGYAGYIDGGASQEEFYKFIKPILEKMDGTEELLVKLNREDLLRKQRTFDNGSIPHQIHLGELHAILRRQEDFYPFLKDNREKIEKILTFRIPYYVGPLARGNSRFAWMTRKSEETITPWNFEEVVDKGASAQSFIERMTNFDKNLPNEKVLPKHSLLYEYFTVYNELTKVKYVTEGMRKPAFLSGEQKKAIVDLLFKTNRKVTVKQLKEDYFKKIECFDSVEISGVEDRFNASLGAYHDLLKIIKDKDFLDNEENEDILEDIVLTLTLFEDRGMIEERLKTYAHLFDDKVMKQLKRRRYTGWGRLSRKLINGIRDKQSGKTILDFLKSDGFANRNFMQLIHDDSLTFKEDIQKAQVSGQGHSLHEQIANLAGSPAIKKGILQTVKIVDELVKVMGHKPENIVIEMARENQTTQKGQKNSRERMKRIEEGIKELGSQILKEHPVENTQLQNEKLYLYYLQNGRDMYVDQELDINRLSDYDVDHIVPQSFIKDDSIDNKVLTRSDKNRGKSDNVPSEEVVKKMKNYWRQLLNAKLITQRKFDNLTKAERGGLSELDKAGFIKRQLVETRQITKHVAQILDSRMNTKYDENDKLIREVKVITLKSKLVSDFRKDFQFYKVREINNYHHAHDAYLNAVVGTALIKKYPKLESEFVYGDYKVYDVRKMIAKSEQEIGKATAKYFFYSNIMNFFKTEITLANGEIRKRPLIETNGETGEIVWDKGRDFATVRKVLSMPQVNIVKKTEVQTGGFSKESILPKRNSDKLIARKKDWDPKKYGGFDSPTVAYSVLVVAKVEKGKSKKLKSVKELLGITIMERSSFEKNPIDFLEAKGYKEVKKDLIIKLPKYSLFELENGRKRMLASAGELQKGNELALPSKYVNFLYLASHYEKLKGSPEDNEQKQLFVEQHKHYLDEIIEQISEFSKRVILADANLDKVLSAYNKHRDKPIREQAENIIHLFTLTNLGAPAAFKYFDTTIDRKRYTSTKEVLDATLIHQSITGLYETRIDLSQLGGD

SEQ ID NO: 551 - protein, 1368 aa, Streptococcus sp.
MDKKYSIGLDIGTNSVGWAVITDDYKVPSKKFKVLGNTDRHSIKKNLIGALLFDSGEIAEATRLKRTARRRYTRRKNRICYLQEIFSNEMAKVDDSFFHRLEESFLVEEDKKHERHPIFGNIVDEVAYHEKYPTIYHLRKKLVDSTDKADLRLIYLALAHMIKFRGHFLIEGDLNPDNSDVDKLFIQLVQTYNQLFEENPINASGVDAKAILSARLSKSRRLENLIAQLPGEKKNGLFGNLIALSLGLTPNFKSNFDLAEDAKLQLSKDTYDDDLDNLLAQIGDQYADLFLAAKNLSDAILLSDILRLNSEITKAPLSASMIKRYDEHHQDLTLLKALVRQQLPEKYKEIFFDQSKNGYAGYIDGGASQEEFYKFIKPILEKMDGTEELLAKLNREDLLRKQRTFDNGSIPHQIHLGELHAILRRQEDFYPFLKDNREKIEKILTFRIPYYVGPLARGNSRFAWMTRKSEETITPWNFEEVVDKGASAQSFIERMTNFDKNLPNEKVLPKHSLLYEYFTVYNELTKVKYVTEGMRKPAFLSGEQKKAIVDLLFKTNRKVTVKQLKEDYFKKIECFDSVEISGVEDRFNASLGTYHDLLKIIKDKDFLDNEENEDILEDIVLTLTLFEDREMIEERLKTYAHLFDDKVMKQLKRRRYTGWGRLSRKLINGIRDKQSGKTILDFLKSDGFANRNFMQLIHDDSLTFKEDIQKAQVSGQGDSLHEHIANLAGSPAIKKGILQTVKVVDELVKVMGRHKPENIVIEMARENQTTQKGQKNSRERMKRIEEGIKELGSQILKEHPVENTQLQNEKLYLYYLQNGRDMYVDQELDINRLSDYDVDHIVPQSFIKDDSIDNKVLTRSDKNRGKSDNVPSEEVVKKMKNYWRQLLNAKLITQRKFDNLTKAERGGLSELDKAGFIKRQLVETRQITKHVAQILDSRMNTKYDENDKLIREVKVITLKSKLVSDFRKDFQFYKVREINNYHHAHDAYLNAVVGTALIKKYPKLESEFVYGDYKVYDVRKMLAKSEQEIGKATAKYFFYSNIMNFFKTEITLANGEIRKRPLIETNGETGEIVWDKGRDFATVRKVLSMPQVNIVKKTEVQTGGFSKESILPKRNSDKLIARKKDWDPKKYGGFDSPTVAYSVLVVAKVEKGKSKKLKSVKELLGITIMERSSFEKNPIDFLEAKGYKEVRKDLIIKLPKYSLFELENGRKRMLASAGELQKGNELALPSKYVNFLYLASHYEKLKGSPEDNEQKQLFVEQHKHYLDEIIEQISEFSKRVILADANLDKVLSAYNKHRDKPIREQAENIIHLFTLTNLGAPTAFKYFDTTIDRKRYTSTKEVLDATFIHQSITGLYETRIDLSQLGGD

SEQ ID NO: 552 - protein, 1368 aa, Streptococcus pyogenes
MDKKYSIGLDIGTNSVGWAVITDDYKVPSKKLKGLGNTDRHGIKKNLIGALLFDSGETAEATRLKRTARRRYTRRKNRICYLQEIFSNEMAKVDDSFFHRLEESFLVEEDKKHERHPIFGNIVDEVAYHEKYPTIYHLRKKLADSTDKVDLRLIYLALAHMIKFRGHFLIEGDLNPDNSDVDKLFIQLVQTYNQLFEENPINASRVDAKAILSARLSKSRRLENLIAQLPGEKKNGLFGNLIALSLGLTPNFKSNFDLAEDAKLQLSKDTYDDDLDNLLAQIGDQYADLFLAAKNLSDATLLSDILRVNSEITKAPLSASMIKRYDEHHQDLTLLKALVRQQLPEKYKEIFFDQSKNGYAGYIDGGASQEEFYKFIKPILEKMDGTEELLAKLNREDLLRKQRTFDNGSIPYQIHLGELHAILRRQEDFYPFLKDNREKIEKILTFRIPYYVGPLARGNSRFAWMTRKSEETITPWNFEEVVDKGASAQSFIERMTNFDKNLPNEKVLPKHSLLYEYFTVYNELTKVKYVTEGMRKPAFLSGEQKKAIVDLLFKTNRKVTVKQLKEDYFKKIECFDSVEISGVEDRFNASLGTYHDLLKIIKDKDFLDNEENEDILEDIVLTLTLFEDREMIEERLKTYAHLFDDKVMKQLKRRRYTGWGRLSRKLINGIRDKQSGKTILDFLKSDGFANRNFMQLIHDDSLTFKEDIQKAQVSGQGDSLHEHIANLAGSPAIKKGILQTVKVVDELVKVMGRHKPENIVIEMARENQTTQKGQKNSRERMKRIEEGIKELGSDILKEYPVENTQLQNEKLYLYYLQNGRDMYVDQELDINRLSDYDVDHIVPQSFLKDDSIDNKVLTRSDKNRGKSDNVPSEEVVKKMKNYWRQLLNAKLITQRKFDNLTKAERGGLSELDKVGFIKRQLVETRQITKHVAQILDSRMNTKYDENDKLIREVRVITLKSKLVSDFRKDFQFYKVREINNYHHAHDAYLNAVVGTALIKKYPKLESEFVYGDYKVYDVRKMIAKSEQEIGKATAKYFFYSNIMNFFKTEITLANGEIRKRPLIETNGETGEIVWDKGRDFATVRKVLSMPQVNIVKKTEVQTGGFSKESILPKRNSDKLIARKKDWDPKKYGGFDSPTVAYSVLVVAKVEKGKSKKLKSVKELLGITIMERSSFEKDPIDFLEAKGYKEVRKDLIIKLPKYSLFELENGRKRMLASAGELQKGNELALPSKYVNFLYLASHYEKLKGSPEDNEQKQLFVEQHKHYLDEIIEQISEFSKRVILADANLDKVLSAYNKHRDKPIREQAENIIHLFTLTNLGAPAAFKYFDTTIDRKRYTSTKEVLDATLIHQSITGLYETRIDLSQLGGD

SEQ ID NO: 553 - protein, 1368 aa, Streptococcus pyogenes
MDKKYSIGLDIGTNSVGWAVITDDYKVPSKKFKVLGNTDRHSIKKNLIGALLFDSGETAEATRLKRTARRRYTRRKNRICYLQEIFSNEMAKVDDSFFHRLEESFLVEEDKKHERHPIFGNIVDEVAYHEKYPTIYHLRKKLVDSTDKADLRLIYLALAHMIKFRGHFLIEGDLNPDNSDVDKLFIQLVQTYNQLFEENPINASGVDAKAILSARLSKSRRLENLIAQLPGEKKNGLFGNLIALSLGLTPNFKSNFDLAEDAKLQLSKDTYDDDLDNLLAQIGDQYADLFLAAKNLSDAILLSDILRVNTEITKAPLSASMIKRYDEHHQDLTLLKALVRQQLPEKYKEIFFDQSKNGYAGYIDGGASQEEFYKFIKPILEKMDGTEELLVKLNREDLLRKQRTFDNGSIPHQIHLGELHAILRRQEDFYPFLKDNREKIEKILTFRIPYYVGPLARGNSRFAWMTRKSEETITPWNFEEVVDKGASAQSFIERMTNFDKNLPNEKVLPKHSLLYEYFTVYNELTKVKYVTEGMRKPAFLSGEQKKAIVDLLFKTNRKVTVKQLKEDYFKKIECFDSVEISGVEDRFNASLGTYHDLLKIIKDKDFLDNEENEDILEDIVLTLTLFEDREMIEERLKTYAHLFDDKVMKQLKRRRYTGWGRLSRKLINGIRDKQSGKTILDFLKSDGFANRNFMQLIHDDSLTFKEDIQKAQVSGQGDSLHEHIANLAGSPAIKKGILQTVKVVDELVKVMGRHKPENIVIEMARENQTTQKGQKNSRERMKRIEEGIKELGSQILKEHPVENTQLQNEKLYLYYLQNGRDMYVDQELDINRLSDYDVDHIVPQSFLKDDSIDNKVLTRSDKNRGKSDNVPSEEVVKKMKNYWRQLLNAKLITQRKFDNLTKAERGGLSELDKAGFIKRQLVETRQITKHVAQILDSRMNTKYDENDKLIREVKVITLKSKLVSDFRKDFQFYKVREINNYHHAHDAYLNAVVGTALIKKYPKLESEFVYGDYKVYDVRKMIAKSEQEIGKATAKYFFYSNIMNFFKTEITLANGEIRKRPLIETNGETGEIVWDKGRDFATVRKVLSMPQVNIVKKTEVQTGGFSKESILPKRNSDKLIARKKDWDPKKYGGFDSPTVAYSVLVVAKVEKGKSKKLKSVKELLGITIMERSSFEKNPIDFLEAKGYKEVKKDLIIKLPKYSLFELENGRKRMLASAGELQKGNELALPSKYVNFLYLASHYEKLKGSPEDNEQKQLFVEQHKHYLDEIIEQISEFSKRVILADANLDKVLSAYNKHRDKPIREQAENIIHLFTLTNLGAPAAFKYFDTTIDRKRYTSTKEVLDATLIHQSITGLYETRIDLSQLGGD

SEQ ID NO: 554 - protein, 1368 aa, Streptococcus pyogenes
MDKKYSIGLDIGTNSVGWAVITDDYKVPSKKFKVLGNTDRHSIKKNLIGALLFDSGETAEATRLKRTARRRYTRRKNRICYLQEIFSNEMAKVDDSFFHRLEESFLVEEDKKHERHPIFGNIVDEVAYHEKYPTIYHLRKKLVDSTDKADLRLIYLALAHMIKFRGHFLIEGDLNPDNSDVDKLFIQLVQTYNQLFEENPINASGVDAKAILSARLSKSRRLENLIAQLPGEKKNGLFGNLIALSLGLTPNFKSNFDLAEDAKLQLSKDTYDDDLDNLLAQIGDQYADLFLAAKNLSDAILLSDILRLNSEITKAPLSASMIKRYDEHHQDLTLLKALVRQQLPEKYKEIFFDQSKNGYAGYIDGGASQEEFYKFIKPILEKMDGTEELLAKLNREDLLRKQRTFDNGSIPHQIHLGELHAILRRQEDFYPFLKDNREKIEKILTFRIPYYVGPLARGNSRFAWMTRKSEETITPWNFEEVVDKGASAQSFIERMTNFDKNLPNEKVLPKHSLLYEYFTVYNELTKVKYVTEGMRKPAFLSGEQKKAIVDLLFKTNRKVTVKQLKEDYFKKIECFDSVEISGVEDRFNASLGTYHDLLKIIKDKDFLDNEENEDILEDIVLTLTLFEDREMIEERLKTYAHLFDDKVMKQLKRRRYTGWGRLSRKLINGIRDKQSGKTILDFLKSDGFANRNFMQLIHDDSLTFKEDIQKAQVSGQGDSLHEHIANLAGSPAIKKGILQTVKVVDELVKVMGRHKPENIVIEMARENQTTQKGQKNSRERMKRIEEGIKELGSQILKEHPVENTQLQNEKLYLYYLQNGRDMYVDQELDINRLSDYDVDHIVPQSFIKDDSIDNKVLTRSDKNRGKSNNVPSEEVVKKMKNYWRQLLNAKLITQRKFDNLTKAERGGLSELDKAGFIKRQLVETRQITKHVAQILDSRMNTKYDENDKLIREVKVITLKSKLVSDFRKDFQFYKVREINNYHHAHDAYLNAVVGTALIKKYPKLESEFVYGDYKVYDVRKMIAKSEQEIGKATAKYFFYSNIMNFFKTEITLANGEIRKRPLIETNGETGEIVWDKGRDFATVRKVLSMPQVNIVKKTEVQTGGFSKESILPKRNSDKLIARKKDWDPKKYGGFDSPTVAYSVLVVAKVEKGKSKKLKSVKELLGITIMERSSFEKNPIDFLEAKGYKEVRKDLIVKLPKYSLFELENGRKRMLASAGELQKGNELALPSKYVNFLYLASHYEKLKGSPEDNEQKQLFVEQHKHYLDEIIEQISEFSKRVILADANLDKVLSAYNKHRDKPIREQAENIIHLFTLTNLGAPAAFKYFDTTIDRKRYTSTKEVLDATFIHQSITGLYETRIDLSQLGGD

SEQ ID NO: 555 - protein, 1368 aa, Streptococcus pyogenes
MDKKYSIGLDIGTNSVGWAVITDDYKVPSKKFKVLGNTDRHSIKKNLIGALLFDSGEIAEATRLKRTARRRYTRRKNRICYLQEIFSNEMAKVDDSFFHRLEESFLVEEDKKHERHPIFGNIVDEVAYHEKYPTIYHLRKKLVDSTDKADLRLIYLALAHMIKFRGHFLIEGDLNPDNSDVDKLFIQLVQTYNQLFEENPINASGVDAKAILSARLSKSRRLENLIAQLPGEKKNGLFGNLIALSLGLTPNFKSNFDLAEDAKLQLSKDTYDDDLDNLLAQIGDQYADLFLAAKNLSDAILLSDILRLNSEITKAPLSASMIKRYDEHHQDLTLLKALVRQQLPEKYKEIFFDQSKNGYAGYIDGGASQEEFYKFIKPILEKMDGTEELLAKLNREDLLRKQRTFDNGSIPHQIHLGELHAILRRQEDFYPFLKDNREKIEKILTFRIPYYVGPLARGNSRFAWMTRKSEETITPWNFEEVVDKGASAQSFIERMTNFDKNLPNEKVLPKHSLLYEYFTVYNELTKVKYVTEGMRKPAFLSGEQKKAIVDLLFKTNRKVTVKQLKEDYFKKIECFDSVEISGVEDRFNASLGTYHDLLKIIKDKDFLDNEENEDILEDIVLTLTLFEDREMIEERLKTYAHLFDDKVMKQLKRRRYTVWGRLSRKLINGIRDKQSGKTILDFLKSDGFANRNFMQLIHDDSLTFKEDIQKAQVSGQGDSLHEHIANLAGSPAIKKGILQTVKVVDELVKVMGRHKPENIVIEMARENQTTQKGQKNSRERMKRIEEGIKELGSQILKEHPVENTQLQNEKLYLYYLQNGRDMYVDQELDINRLSDYDVDHIVPQSFIKDDSIDNKVLTRSDKNRGKSDNVPSEEVVKKMKNYWRQLLNAKLITQRKFDNLTKAERGGLSELDKAGFIKRQLVETRQITKHVAQILDSRMNTKYDENDKLIREVKVITLKSKLVSDFRKDFQFYKVREINNYHHAHDAYLNAVVGTALIKKYPKLESEFVYGDYKVYDVRKMLAKSEQEIGKATAKYFFYSNIMNFFKTEITLANGEIRKRPLIETNGETGEIVWDKGRDFATVRKVLSMPQVNIVKKTEVQTGGFSKESILPKRNSDKLIARKKDWDPKKYGGFDSPTVAYSVLVVAKVEKGKSKKLKSVKELLGITIMERSSFEKNPIDFLEAKGYKEVRKDLIIKLPKYSLFELENGRKRMLASAGELQKGNELALPSKYVNFLYLASHYEKLKGSPEDNEQKQLFVEQHKHYLDEIIEQISEFSKRVILADANLDKVLSAYNKHRDKPIREQAENIIHLFTLTNLGAPTAFKYFDTTIDRKRYTSTKEVLDATFIHQSITGLYETRIDLSQLGGD

SEQ ID NO: 556 - protein, 1368 aa, Streptococcus pyogenes
MDKKYSIGLDIGTNSVGWAVITDDYKVPSKKFKVLGNTDRHSIKKNLIGALLFDSGETAEATRLKRTARRRYTRRKNRICYLQEIFSNEIAKVDDSFFHRLEESFLVEEDKKHERHPIFGNIVDEVAYHEKYPTIYHLRKKLADSTDKADLRLIYLALAHMIKFRGHFLIEGDLNPDNSDVDKLFIQLVQTYNQLFEENPINASRVDAKAILSARLSKSRRLENLIAQLPGEKRNGLFGNLIALSLGLTPNFKSNFDLAEDAKLQLSKDTYDDDLDNLLAQIGDQYADLFLAAKNLSDAILLSDILRVNTEITKAPLSASMIKRYDEHHQDLTLLKALVRQQLPEKYKEIFFDQSKNGYAGYIDGGASQEEFYKFIKPILEKMDGTEELLAKLNREDLLRKQRTFDNGSIPHQIHLGELHAILRRQEDFYPFLKDNREKIEKILTFRIPYYVGPLARGNSRFAWMTRKSEETITPWNFEEVVDKGASAQSFIERMTNFDKNLPNEKVLPKHSLLYEYFTVYNELTKVKYVTEGMRKPAFLSGEQKKAIVDLLFKTNRKVTVKQLKEDYFKKIECFDSVEISGVEDRFNASLGTYHDLLKIIKDKDFLDNEENEDILEDIVLTLTLFEDREMIEERLKTYAHLFDDKVMKQLKRRRYTGWGRLSRKLINGIRDKQSGKTILDFLKSDGFANRNFMQLIHDDSLTFKEDLQKAQVSGQGDSLHEHIANLAGSPAIKKGILQTVKVVDELVKVMGRHKPENIVIEMARENQTTQKGQKNSRERMKRIEEGIKELGSDILKEYPVETTQLQNEKLYLYYLQNGRDMYVDQELDINRLSDYDVDHIVPQSFLKDDSIDNKVLTRSDKNRGKSDNVPSEEVVKKMKNYWKQLLNAKLITQRKFDNLTKAERGGLSELDKAGFIKRQLVETRQITKHVAQILDSRMNTKYDENDKLIREVRVITLKSKLVSDFRKDFQFYKVREINNYHHAHDAYLNAVVGTALIKKYPKLESEFVYGDYKVYDIRKMIAKSEQEIGKATAKYFFYSNIMNFFKTEITLANGEIRKRPLIETNGETGEIVWDKGRDFATVRKVLSMPQVNIVKKTEVQTGGFSKESILPKRNSDKLIARKKDWDPKKYGGFDSPTVAYSVLVVAKVEKGKSKKLKSVKELVGITIMERSSFEKDPVDFLEAKGYKEVRKDLIIKLPKYSLFELENGRKRMLASAGELQKGNELALPSKYVNFLYLASHYEKLKGSPEDNEQKQLFVEQHKHYLDEIIEQISEFSKRVILADANLDKVLSAYNKHRDKPIREQAENIIHLFTLTNLGAPAAFKCFDTTIGRNRYKSIKEVLDATLIHQSITGLYETRIDLSQLGGD

SEQ ID NO: 557 - protein, 1368 aa, Streptococcus pyogenes [sequence omitted]

SEQ ID NO: 558 - protein, 1368 aa, Streptococcus pyogenes; identical to SEQ ID NO: 552

SEQ ID NO: 559 - protein, 1370 aa, Streptococcus ratti
  source 1..1370: note = FA-1 = DSM 20564
MKKPYSIGLDIGTNSVGWAVITDDYKVPAKKMKVLGNTDKNYIKKNLLGALLFDSGNTAEDRRLKRTARRRYTRRRNRLLYLQDIFSDEMNKVDESFFHRLEDSFLVSEDKRGDHHPIFGNVVDEVKYHEQFPTIYHLRKYLADTPEKADLRLVYLALAHMIKFRGHFLIDDPKLDVKNTDSQELFSQFLTAYDVTQEDSHLADVKINISDIITEKMNKSRKVEALLFHFPSQKKNSFFGNLVSLVFGLLPNFKTNFNLAEDAKLQLSKDSYDEDLENLLGQIGDEYTDVFVAARKLYDSILLSGILTVNDLSTKAILSASMVRRYEEHNKDLAKLKAFVKANFTHDVFKEVFSDASKNGYAGYIEGKTSQEDFYKYVKNLIGKVDGSADFIEKIDREDFLRKQRTFDNGSIPHQVHLAEMKAILRRQGEYYPFLKEHAEKIQQILTFRIPYYVGPLDRHGHSDFAWASFNSEEKVTPWNFEEIIDKNKSAQAFIERMTNQDLYLPNEKVLPKHSPLYEKYTVYNELTKIKYVTETGTAKFFDANLKQEIFDGLFKKERKVTKRKLLTFLEKNFDEFRIVDIQGLDKETETFNASYGIYQDLLKIIKDKAFMDDSENADILEDIVLTLTLFEDREMIKQRLAKYADLFDKKVIDNLARRRYTGWGRLSAKLLNGIRDKRSRKTIMDYLVDDGRSNRNLMQLITDDNLTFKDEIAKAQYSDNSDDLHQVVQDLAGSPAIKKGILQSVKIVDELVKVMGYEPEQIVVEMARENQTTAKGRRNSQQRYKRLEEAIKNLDRDLNYKILKEHPTDNQALQNDRLFLYYLQNGRDMYTGESLDINRLSDYDIDHIIPQAFIKDNSIDNRVLVSSAKNRGKSDDVPSEDVVNRMRPFWNKLLNCGLISQRKYSNLTKKELTPNDKAGFIKRQLVETRQITKHVARILDEHFNKEFDEDKKRIRKVKVVTLKSNLVSNFRKEFELYKVREINDYHHAHDAYLNAVVAKALLMKYPKLEPEFVYGEYPKYNSYRERKTATQRMFFYSNIMNMFKSKVKLADERIIERPMIEVNDETGEIAWDKTKHIATVKKVLSYPQINIVKKVEEQTGGLTNETIYPRGSFDKLLNRKNTLEASKYGGFGSPTVAYCVLVVADSKNENGKVKKLKLGSELLGITILEKNDFENNSLDFLSRKGYQGVQEKKIIKLPKYSLFEFQDGSRRMLSSVMANDNKRGDLQKANEMILPAYLVKLLYHAKHINSVGEPAHKNYINEHCSEFQDLLNYIRQFADKFVDVDKNLSKIRSLSKSMAEYSVSEICSSFVNLLTLTALGAPADFKFFGTTIPRKRYGSPQSILSATLIHQSITGLYETRIDLSKLGED

SEQ ID NO: 560 - protein, 1127 aa, Streptococcus salivarius
MSDLVLGLDIGIGSVGVGILNKVTGEIIHKNSRIFPAAQAENNVERRINRQGRRLTRRKKHRRVRLNHLFEESGLITDFTNVSINLNPYQLRVKGLTDELSNEELFIALKNMVKHRGISYLDDASDDGNSSVGDYAQIVKENSKQLETKTPGQIQLERYQKYGQLRGDFTVEEDGKKHRLINVFPTSAYRAEALRILQTQQEFNPQITDEFINSYLQILTGKRKYYHGPGNEKSRTDYGRYTTKKDSEDEYITLDNIFGILIGKCTFYPEEYRAAKASYTAQEFNLLNDLNNLTVPTETKKLSEEQKNQIITNVKNEKAMGPAKLFKYIAKLLSCDVADIKGYRIDKSDKAEIHTFEAYRKMKTLATIDIEQMERENLDKLAYVLTLNTEKEGIQEALEHEFADGTFSQEQIDELVQFRKANSSIFGKGWHSFSVKLMMELIPELYATSEEQMTILTRLGKQKTTSSSNKTKYIDEKQLTEEIYNPVAAKSVRQAIKIVNAAIKEYGDFDNIVIEMARETNEDDEKKAIQKIQKANKDEKDAAMLKAANQYNGKAELPHSVFHGHKQLATKIRLWHQQGERCLYTGKTISIHDLINNSNQFEIDHILPLSITFDDSLANKVLVYATANQEKGQRTPYQALDSMDDAWSFRELKAFVRDSKALSNKKKEYLLTEEDISKFDVRKKFIERNLVDTRYASRVVLNALQEHFRVHKTDTKVSVVRGQFTSQLRRHWGIEKTRDTYHHHAVDALIIAASSQLNLWKKQKNTLVSYSEDQLLDIETGELISDDEYKESVFKAPYQHFVDTLKSKEFEDSILFSYQVDSKFNRKISDATIYATRQAKVGKDKKDETYVLGKIKDIYSQTGYDAFIKIYKKDKSKFLMYRHDPQTFEKVIEPILENYPNKELNEKGKEVPCNPFLKYKEDHGYIRKYSKKGNGPEIKSLKYYDSKLGNHIDITPKNSNNKVVLQSVSPWRADVYFNKTTGKYEILGLKYADLKFEKGTGTYKISEEKYNDIKIKEGVDSDSEFKFTLYKNDLLLIKDTETKEQQLFRFLSRTMPNVKHYVELKPYDKQKFDDNEELIKILGIVAKGGQCKKGVSKPNISIYKIRTDVLGNQHIIKNEGDKPKLDF

SEQ ID NO: 561 - protein, 1385 aa, Streptococcus salivarius
  source 1..1385: note = K12
MTKPYSIGLDIGTNSVGWAVITDDYKVPSKKMKVLGNTSKKYIKKNLLGALLFDSGITAEGRRLKRTARRRYTRRRNRILYLQEIFSTEMATLDDAFFQRLDDSFLVPDDKRDSKYPIFGNLVEEKVYHDEFPTIYHLRKHLADSSKKADLRLVYLALAHMIKYRGHFLIEGDFNSKNNDLQKNFQDFLDTYNAIFESDLSLENSKQLEEIVKDKISKSAKKDRILKLFPGEKNSGIFSEFLKLIVGNQADFRKYFNLDEKTSLQFSKESYDEDLETLLGHIGDDYSDVFLKAKKLYDAILLSGILTVTDNGTEAPLSSAMIMRYKEHEEDLALLKAYIRNISLETYNEVFKDNTKNGYAGYIDGKTSQEDFYVYLKRLLAGLEGADYFLEKIDREDFLRKQRTFDNGSIPYQIYLQEMRAILDKQAKFYPFLAKNKERIEKILTFRIPYYVGPLARGNSDFAWSIRKRNEKITPWNFEDVIDKESSAEAFINRMTSFDLYLPEEKVLPKHSLLYENFTVYNELTKVRFIAEGMRDYQFLDSKQKKDIVRLYFKGKRKVTDKDIIEYLHAIDGYDGIELKGIEKQFNSSLSTYHDLLNIINDKEFLDDSSNETIIEEIIHTLTMFEDREMIKQRLSKFDNIFDKSVLKKLSRRHYTGWGKLSAKLINGIRDEKSGNTILDYLIDDGVSNRNFMQLIHDDALSFKKKIKKAQIIGDKDNIKQVVKSLPGSPAIKKGILQSIKIVDELVKVMGREPESIVVEMARENQYTNQGKSNSQQRLKRLEESLKGLGSKILKENVPTRLSKIDNNALQNDRLYLYYLQNGKDMYTGEELDIDRLSNYDIDHIIPQAFLKDDSIDNKVLVSSASNRGKSDDVPSLEVVKKRKTLWYQLLKSKLISQRKFDNLTKAERGGLSQEEKAGFIQRQLVETRQITKHVARLLDERFNNKKDENNRTLRTVKIITLKSSLVSQFRKDFELYKVREINDFHHAHDAYLNAVVASALLKKYPKLEPEFVYGDYPKYNSFRERKSATEKVYFYSNIMNIFKKSIPLADGTVIDRPLIEVNEETGESVWNKVADLNTVRKVLSYSQVNIVKKVEEQNHGLDRGKPKGLFNANLSSKPKPNSKENLVGAKEYLDPKKYGGYAGISNSFAILVKGTIEKGAKKKITNVLEFQGISILDRIYYRKDKLNFLLEKGYKDIELIIELPKYSLFELSDGSRRMLASILSTNNKRGEIHKGNQIFISQKFVKLLYHAKRISSTFNENHRKYVENHKKEFEELFYYILEFNENYVGAKKNGELLKSAFQSWQNHSIDELCSSFIGPTGSERKGLFELTSRGGAADFEFLGVKIPRYRDYTPSSLLKDATLIHQSVTGLYETRIDLGKLGED

SEQ ID NO: 562 - protein, 1135 aa, Streptococcus salivarius
  source 1..1135: note = PS4
MSDLVLGLDIGIGSVGVGILNKVTGEIIHKNSRIFPAAQAENNLERRTNRQGRRLTRRKKHRRVRLNHLFEESGLITDFTKVSINLNPYQLRVKGLTAELSNEELFIALKNMVKHRGISYLDDASDDGNSSVGDYAQIVKENSKQLETKTPGQIQLERYQKYGQLRGDFTVEEDGRKHRLINVFPTSAYHAEALRILQTQQEFNPQITDEFINSYLEILTGKRKYYHGPGNEKSRTDYGKYTTKKDAQGQYITLNNIFGILIGKCTFYPEEYRAAKASYTAQEFNLLNDLNNLTVPTETKKLSEEQKYQIITYVKNEKAMGPAKLFKYIAKLLACDIADIKGYRIDKSDKAEIHTFEAYRKMKTLETIDIEQIEREKLDKLAYVLTLNTEREGIQEALDHEFADGTFSQEQVDELVQFRKANSSIFGKGWHSFSVKLMMELIPELYATSEEQMTILTRLGKQKTTSSSNKTKYIDEKQLTEEIYNPVVAKSVRQAIKIVNAAIKKYGDFDNIVIEMARETNEDDEKKAIQKIQKANKAEKDAAMRKAANQYNGKAELPHSVFHGHKQLATKIRLWHQQGERCLYTGKTISIHDLINNPNQFEIDHILPLSITFDDSLANKVLVYATANQEKGQRTPYQALDSMDDAWSFRELKAFVRESKALSNKKKEYLLTEEDISKFDVRKKFIERNLVDTRYASRVVLNALQEHFKAHKIDTKVSVVRGQFTSQLRRHWGIDKTRDTYHHHAVDALIIAASSQLNLWKKQKNTLVSYSEDQLLDIETGELISDDEYKESVFKAPYQHFVDTLKSKEFEDSILFSYQVDSKFNRKISDATIYATRQAKVGKDKKDETYVLGKIKDIYALGTKTPSKTGFYKFLDLYNKDKSQFLVYQKDRKTWDEVIEKIMEQYRPFKESDKNGKEVDFNPFEKYRIENGPIRKYSRKGNGPEIKSLKYYASKLGNHIDITPKDSNNKVVLQSVSPWRADVYFNKTTGSYEILGLKYADLQFEKGTGTYRISEEKYNDIKKKEGVDSDSEFKFTLYKNDLLLIKDTETKEQRLFRFLSRSMPNKKHYVELKPYSKDKFEKNESLIEILGSADKSGRCIKGLAKSNLSIFKVRTDVLGNQHIIKNEGDKPKLDF

SEQ ID NO: 563 - protein, 1377 aa, Streptococcus sanguinis
  source 1..1377: note = SK115
MKKPYSIGLDIGTNSVGWAVITDDYKVPSKKMKVLGNTDKHFIKKNLIGALLFDEGTTAEDRRLKRTSRRRYTRRKNRLRYLQEIFSEEISKLDSSFFHRLDDSFLVPEDKRGSKYPIFATLEEEKEYHKKFPTIYHLRKHLADSKEKTDLRLIYLALAHMIKYRGHFLYEESFDIKNNDIQKIFNEFISIYDNTFEGSSLSGQNAQVEAIFTDKISKSTKRERVLKLFSDEKSTGLFSEFLKLIVGNQADFKKHFDLEEKAPLQFSKDTYDEDLENLLGQIGDGFADLFLVAKKLYDAILLSGILTVTDPSTKAPLSASMIERYENHQEDLAALKQFIKNNLSEKYAEVFSDQSKDGYAGFIDGKTTQEAFYKYIKNLLSKLEGADYFLNKIEREDFLRKQRTFDNGSIPHQIHLQEMNAILRRQGEHYLFLKENREKIEKILAFRIPYYVGPLARGNRDFAWLTRNSDQAIRPWNFEEVVDKASSAEDFINKMTNYDLYLPEEKVLPKHSLLYETFAVYNELTKVKFIAEGLRDYQFLDSGQKKQIVNQLFKDKRKVTEKDIIHYLHNVDGYDGIELKGIEKQFNASLSTYHDLLKIIKDKEFMDNPKNGEILENIIHTLTIFEDREMIKQRLAQYDTLFDEKVIKALTRRHYTGWGKLSAKLINGIRDKQTGKTILEYLIDDGDCNRNFMQLINDDGLSFKEIIQKAQVVGKTDDVKQVVQEIPGSPAIKKGILQSIKIVDELVKVMGHNPESIVIEMARENQTTAKGKKNSQQRYKRIEDALKNLAPGLDSNILKENPTDNIQLQNDRLFLYYLQNGKDMYTGKAIDINQLSNYDIDHIIPQAFIKDDSLDNRVLTSSKDNRGKSDNVPSIEVVQKRKAFWQQLLDSKLISERKFNNLTKAKRGGLDERDKVGFIKRQLVETRQITKHVAQLLDTRFNTEVNEENQKIRTVKIITLKSNLVSNFRKEFGLYKVREINDYHHAHDAYLNAVVAKAILKKYPKLEPEFVYGDYQKYDLKRYILKSKASNTIDKATEKYFFYSNLLNFFKEKVRYADGTIKKRENIEYSNDTGEIAWNKEKDFATIKKVLSLPQVNIVKKTEEQTVGQNGGLFDNNIVSKKKVVDASKLIPIKSSLSPEKYGGYARPTIAYSVLVIADIEKGKGKAKKLKRIKEIVGITIQDKKKFESNPVTYLEECGYKNINSNLIIKLPKYSLFEFNDGQRRLLASSIELQKGNELILPYHLTALLYHAQRINKISEPIHKQYVEAHQNEFKELLTTIISLSKKYIQKPNVELLLQQAFDQADKDIYQLSESFISLLKLTSFGAPGAFKFLGVEISQSSVRYKPNSQFLDTTLIHQSITGLYETRIDLSKLGED

SEQ ID NO: 564 - protein, 1392 aa, Streptococcus sanguinis
  source 1..1392: note = SK330
MENKNYSIGLDIGTNSVGWAVITDDYKVPSKKMKVFGNTDKHFIKKNLIGALLFDEGATAEDRRLKRTARRRYTRRKNRLRYLQEIFSEEISKLDSSFFHRLDDSFLVPKDKRGSKYPIFATLEEEKEYHKKFPTIYHLRKHLADSKEKTDLRLIYLALAHMIKYRGHFLYEESFDIKNNDIQKIFNEFISIYDNTFEGSSLSGQNAQVEAIFTDKISKSAKRERVLKLFSDEKSTSLFSEFLKLIVGNQADFKKHFDLEEKAPLQFSKDTYDEDLENLLGQIGDGFTDLFLVAKKLYDAILLSGILTVTDPSTKAPLSASMIERYESHQKDLAALKQFIKNNLPKRYNEVFSDQSKDGYAGYIDGKTTQEAFYKYIKNLLSKFEGADYFLDKIEREDFLRKQRTFDNGSIPHQIHLQEMNAILRRQGEHYPFLKENREKIEKILTFRIPYYVGPLARGNRDFAWLTRNSDQAIRPWNFEEIVDKASSAEEFINKMTNYDLYLPEEKVLPKHSLLYETFAVYNELTKVKFIAEGLRDYQFLDSGQKKQIVNQLFKEKRKVTEKDIIHYLHNVDGYDGIELKGIEKQFNASLSTYHDLLKIIKDKEFMDDPKNEEILENIVHTLTIFEDREMIKQRLAQYDSIFDEKVIKALTRRHYTGWGKLSAKLINGICDKQTGDTILDYLIDDGKINRNFMQLINDDGLSFKEIIQKAQVVGKTDDVKQVVQELPGSPAIKKGILQSIKIVDELVKVMGYAPESIVIEMARENQTTARGKKNSQQRYKRIEDSLKNLAPGLDSNILKENPTDNIQLQNDRLFLYYLQNGKDMYTGKPLDIDQLSSYDIDHIIPQAFIKDDSIDNRVLTSSKDNRGKSDNVPSLEVVQKRKAFWQQLLDSKLISERKFNNLTKAERGGLDERDKVGFIRRQLVETRQITKHVAQILDASFNTEVNEKNQKIRTVKIITLKSNLVSNFRKEFELYKVREINDYHHAHDAYLNAVVAKAILKKYPKLEPEFVYGDYQKYDLKRYISRFKPSKEIEKATEKYFFYSNLLNFFKEEVHYADGIIVKRENIEYSKDTGEIAWNKEKDFATIKKVLSYPQVNIVKKTEIQTHGLDRGKPKGLFNSNPSPKPSEDSKENLVPIKQGLDPRKYGGYAGISNSYAVLVKAIVEKGAKKQQKTILEFQGISILDKINFENNKENYLLKKRYIEILSTITLPKYSLFEFPDGTRRRLASILSTNNKRGEIHKGNELVLPGKYTTLLYHAKNINKKLEPEHLEYVEKHRNDFAKLLECVLNFNDKYVGALKNGERIRQAFTDWETVDIEKLCFSFIGPENSKNAGLFELTSQGSASDFEFLGVKIPRYRDYAPSSLLKATLIHQSITGLYETRIDLSKLGED

SEQ ID NO: 565 - protein, 1370 aa, Streptococcus sanguinis
  source 1..1370: note = SK353
MKKPYSIGLDIGTNSVGWAVVTDDYKVPAKKMRVFGDTDRSHIKKNLLGTLLFDDGNTAESRRLKRTARRRYTRRRNRILYLQEIFTESMNEIDESFFHRLDDSFLVPEDKRGSKYPIFATLQEEKEYHKQFPTIYHLRKQLADSKEKSDVRLIYLALAHMIKYRGHFLYEETFDIKNNDIQKIFNEFINIYDNTFEGSSLSGQNAQVEAIFTDKISKSAKRERVLKLFPDEKSTGLFSEFLKLIVGNQADFKKHFDLEEKAPLQFSKDTYDEELENLLGQIGDDFADLFLIAKKLYDAILLSGILTVTDPSTKAPLSASMIERYENHQKDLAALKQFIKNNLPEKYVEVFSDQSKDGYAGYIDGKTTQEAFYKYIKNLLSKFEGADYFLDKIEREDFLRKQRTFDNGSIPHQIHLQEMNAILRRQGEHYPFLKENREKIEKILTFRIPYYVGPLARDNRDFSWLTRNSDEPIRPWNFEEVVDKARSAEDFIHRMTNYDLYLPEEKVLPKHSLLYETFAVYNELTKVKFIAEGLRDYQFLDSGQKKQIVNQLFKEKRKVTEKDIIHYLHNVDGYDGIELKGIEKQFNANLSTYHDLLKITKDKEFMDDPKNEEILENIVHTLTIFEDREMIKQRLAQYDTLFDEKVIKALTRRHYTGWGKLSAKLINGIRDKQSGKTILDYLIDDDKINRNFMQLINDDGLSFKEIIQKAQVVGKTDDVKQVVQELPGSPAIKKGILQSIKIVDELVKVMGYALESIVIEMARENQTTARGKKNSQQRYKRIEDALKNLAPGLDSNILKENPTDNIQLKNDRLFLYYLQNGKDMYTGKPLDINQLSSYDIDHIIPQAFIKDDSIDNRVLTSSKDNRGKSDNVPSLEVVQKRKAFWQQLLDSKLISERKFNNLTKAERGGLDERDKVGFIRRQLVETQQITKNVAQILDARFNTEVKEKNQKIRTVKIITLKSNLVSNFRKEFGLYKVREINNYHHAHDAYLNAVVAKAILKKYPKLEPEFVYGDYQKYDLKKYISRFKPSKEIEKATEKYFFYSNLLNFFKEEVLYADGTIRKRENIEYSKDTGEIAWDKEKDFATIKKVLSYPQVNIVKKREVQTGGFSKESILPKGNSDKLIPRKTKDILWDTTKYGGFDSPVIAYSILLIADIEKGKAKKLKTVKTLVGITIMEKAAFEENPITFLENKGYHNVRKENILCLPKYSLFELENGRRRLLASAKELQKGNEIVLPVCLTTLLYHSKNLHKLDEPEHLEYIQKHRNEFKDLLNLVSEFSQKYILAEANLEKIKDLYADNEQADIEILANSFINLLTFTALGAPAAFKFFGKDVDRKRYTTVSEILNATLIHQSITGLYETRIDLSKLGEE

SEQ ID NO: 566 - protein, 1421 aa, Streptococcus sanguinis
  source 1..1421: note = SK49
MTKFNKNYSIGLDIGVSSVGYAVVTEDYRVPAFKFKVLGNTEKEKIKKNLIGSTTFVSAQPAKGTRVFRVNRRRIDRRNHRITYLRDIFQKEIEKVDKNFYRRLDESFRVLGDKSEDLQIKQPFFGDKELETAYHKKYPTIYHLRKHLADADKNSPVADIREVYMAISHILKYRGHFLTLDKINPNNINMQNSWIDFIESCQEVFDLEISDESKNIADIFKSSENRQEKVKKILPYFQQELLKKDKSIFKQLLQLLFGLKTKFKDCFELEEEPDLNFSKENYDENLENFLGSLEEDFSDVFAKLKVLRDTILLSGMLTYTGATHARFSATMVERYEEHRKDLQRFKFFIKQNLSEQDYLDIFGRKTQNGFDVDKETKGYVGYITNKMVLTNPQKQKTIQQNFYDYISGKITGIEGAEYFLNKISDGTFLRKLRTSDNGAIPNQIHAYELEKIIERQGKDYPFLLENKDKLLSILTFKIPYYVGPLAKGSNSRFAWIKRATSSDILDDNDEDTRNGKIRPWNYQKLINMDETRDAFITNLIGNDIILLNEKVLPKRSLIYEEVMLQNELTRVKYKDKYGKAHFFDSELRQNIINGLFKNNSKRVNAKSLIKYLSDNHKDLNAIEIVSGVEKGKSFNSTLKTYNDLKTIFSEELLDSEIYQKELEEIIKVITVFDDKKSIKNYLTKFFGHLEILDEEKINQLSKLRYSGWGRYSAKLLLDIRDEDTGFNLLQFLRNDEENRNLTKLISDNTLSFEPKIKDIQSKSTIEDDIFDEIKKLAGSPAIKRGILNSIKIVDELVQIIGYPPHNIVIEMARENMTTEEGQKKAKTRKTKLESALKNIENSLLENGKVPHSDEQLQSEKLYLYYLQNGKDMYTLDKTGSPAPLYLDQLDQYEVDHIIPYSFLPIDSIDNKVLTHRENNQQKLNNIPDKETVANMKPFWEKLYNAKLISQTKYQRLTTSERTPDGVLTESMKAGFIERQLVETRQIIKHVARILDNRFSDTKIITLKSQLITNFRNTFHIAKIRELNDYHHAHDAYLAVVVGQTLLKVYPKLAPELIYGHHAHFNRHEENKATLRKHLYSNIMRFFNNPDSKVSKDIWDCNRDLPIIKDVIYNSQINFVKRTMIKKGAFYNQNPVGKFNKQLAANNRYPLKTKALCLDTSIYGGYGPMNSALSIIIIAERFNEKKGKIETVKEFHDIFIIDYEKFNNNPFQFLNDTSENGFLKKNNINRVLGFYRIPKYSLMQKIDGTRMLFESKSNLHKATQFKLTKTQNELFFHMKRLLTKSNLMDLKSKSAIKESQNFILKHKEEFDNISNQLSAFSQKMLGNTTSLKNLIKGYNERKIKEIDIRDETIKYFYDNFIKMFSFVKSGAPKDINDFFDNKCTVARMRPKPDKKLLNATLIHQSITGLYETRIDLSKLGED

SEQ ID NO: 567 - protein, 1026 aa, Streptococcus sp.
  source 1..1026: note = BS35b
MNGLVLGLDIGIASVGVGILEKNSGKIIHANSRLFPAATADNNVERRKNRQARRLNRRKKHRGVRFQDLFEDYGLLTDFSKVSINLNPYRLRVDGLNQQLTNEELFIALKNIVKRRGISYLDDASEDGGAVSSDYGKAVEENRKLLAEQTPGQIQLERFEKYGQVRGDFTVVENGEKRRLINVFSTSAYRKEAEKILRKQQEFNNQITDEFIEDYLKILTGKRKYYHGPGNEKSRTDYGRFRTDGTTLDNIFGVLIGKCTFYPNEYRASKSSYTAQEFNLLNDLNNLTVPTETKKLSEEQKKVIVEYAKEAKTLGASTLLKYIVKMIDASVDQISGYRVDVNNKPEMHTFEVYRKMQSLETISVGELSRNVLDELAHILTLNTEREGIEEAINSKLMGVFSQDQVLELVQFRKNNSSLFSKGWHNFSLKLMMELIPELYETSEEQMTILTRLGKQKSKETSKRTKYIDEKELTEEIYNPVVAKSVRQAIKIINEATKKHGIFDNIVIEMARENNEEDAKKDYIKRQKANQDEKNAAMEKAAFQYNGKKELPGNIFNGHKELATKIRLWHQQGEKCLYTGKTIPISDLIHNQYKYEIDHILPLSLSFDDSLSNKVLVHATANQEKGQRTPFQALDSMDDAWSYREFKSYVKDLKSLSNKKKDYLLTEEDISKIEVKQKFIERNLVDTRYSSRVVLNALQDFYKSHQFDTTISVVRGQFTSQLRRKWGLEKSRETYHHHAVDALIIAASSQLRLWKKQNNPLITYKEGQFIDSQTGEIISLTDDEYKELVFKAPYDHFVDTLHSKTFEDGILFSYQVDSKYNRKISDATIYATRKAKLDKDKSEETYVLGKIKDIYSQAGYDAFIKIYNKDKRKFLMYHKDPQTFEKVIEEILRTYPSKERNDKNKEVPCNPFEKYRQENGPIRKYSKKGNGPEIKCLKYYDNKLGNYIDISPDGSDNQVVLQSLKPWRTDVYFNHQTKKYELMGLKYSDLSFEKGSGKYSISNEKYNSIKRIEGVNEQSEFKFTLYK

SEQ ID NO: 568 - protein, 1139 aa, Streptococcus sp.
  source 1..1139: note = C150
MSDLVLGLDIGIGSVGVGILNKVTGEIIHKNSRIFPAAQAENNLERRTNRQGRRLTRRKKHRRVRLNHLFEESGLITDFTKVSINLNPYQLRVKGLTAELSNEELFIALKNMVKHRGISYLDDASDDGNSSVGDYAQIVKENSKQLETKTPGQIQLERYQKYGQLRGDFTVEEDGRKHRLINVFPTSAYHAEALRILQTQQEFNPQITDEFINSYLEILTGKRKYYHGPGNEKSRTDYGKYTTKKDAQGQYITLNNIFGILIGKCTFYPEEYRAAKASYTAQEFNLLNDLNNLTVPTETKKLSEEQKYQIITYVKNEKAMGPAKLFKYIAKLLSCDVADIKGYRIDKSDKAEIHTFEAYRKMKTLETLDVKKMAREELDKLAYVLTLNTEREGIQEALDHEFADGTFSQEQVDELVQFRKANSSIFGKGWHSFSVKLMMELIPELYATSEEQMTILTRLGKQKTTSSSNKTKYIDEKQLTEEIYNPVVAKSVRQAIKIVNAAIKKYGDFDNIVIEMARETNEDDEKKAIQKIQKANKAEKDAAMRKAANQYNGKAELPHSVFHGHKQLATKIRLWHQQGERCLYTGKTISIHDLINNPNQFEIDHILPLSITFDDSLANKVLVYATANQEKGQRTPYQALDSMDDAWSFRELKAFVRESKALSNKKKEYLLTEEDISKFDVRKKFIERNLVDTRYASRVVLNALQEHFRTHKIDTKVSVVRGQFTSQLRRHWGIEKTRDTYHHHAVDALIIAASSQLNLWKKQKNTLVSYSEDQLLDIETGELISDDEYKESVFKAPYQHFVDTLKSKEFEDSILFSYQVDSKFNRKISDATIYATRKAKLDKEKKEYTYTLGKIKDIYALGTKTPSKTGFYKFLDLYKKDKSQFLMYQKDRRTWDEVIEKILEQYRPFKEKDKNGKEVDFNPFEKYRIENGPIRKYSRKGNGPEIKSLKYYDNLLGRFVDITPSESKNPVALLSLNPWRTDVYYNTETRKYEFLGLKYADLCFEKGGSYGISKVKYNKIREKEGIGKNSEFKFTLYKNDLILIKDTETNRQQIFRFWSRTGKDNPKSFEKHKLELKPYEKTRFEKGEELKVLGKVPPSSNRLQKNMQIENLSIYKVRTDVLGNQHIIKNEGDKPKLDF

SEQ ID NO: 569 - protein, 1377 aa, Streptococcus sp.
  source 1..1377: note = C300
MNNKPYSIGLDIGTNSVGWSVITDDYKVPSKKMKVLGNTDKRFIKKNLIGALLFDEGTTAEARRLKRTARRRYTRRKNRLRYLQEIFAEEMSKVDSSFFHRLDDSFLIPEDKRGSKYPIFATLVEEKEYHKQFPTIYHLRKQLADSKEKADLRLIYLVLAHMIKYRGHFLYEEAFDIKNNDIQKIFNEFISIYDNTFEGSSLSGQNAQVETIFTDKISKSAKRERVLKLFPDEKSTGLFSEFLKLIVGNQADFKKHFDLEEKAPLQFSKDTYDEDLENLLEQIGDDFADLFVAAKKLYDAILLSGILTVTDPSTKAPLSASMIERYENHQKDLAVLKQFIKTNLPEKYVEVFSDQSKDGYAGYIDGKTTQEAFYKYIKNLLSKFDGADYFLDKIEREVFLRKQRTFDNGSIPHQIHLQEMNTILRRQGEHYPFLKENKEKIEKILTFRIPYHVGPLARGNRDFAWLTRNSDQAIRPWNFEEIVDKASSAEDFINKMTNYDLYLPEEKVLPKHSLLYETFAVYNELTKVKFIAEGMRDYQFLDSGQKKKIINQLFKKKRKVTEDDIIDCLQKIDNYDGIELKGIEKQFNASLSTYHDILKIIRDKEFMDDPKNGDILENVIHTLTIFEDREMIKQRLAQYNSIFDEKVIKALSRKHYTGWGKLSAKLIDGIRDKQTGKTILDYLMDDGKSNRNFMQLIKDDELSFTEIIQKAQVVGDTDNLRQVVQNLPGSPAIKKGILQSIKIVDELVKVMGHAPESIVIEMARENQTTARGKKNSQQRYKRIEDSLKNLASGLDSNILKENPTDNIQLQNDRLFLYYLQNGKDMYTGEALNINQLSSYDIDHIIPQAFIKDDSLDNRVLTSSKDNRGKSDNVPSLEVVEKMKAFWQQLLDSKLISERKYNNLTKAERERGGLNELDKVGFIKRQLVETRQITKHVAQILDARFNKEVTEKNKKNRNVKIITLKSNMVSNFRKEFGLYKVREINDYHHAHDAYLNAVVAKAILKKYPKLEPEFVYGDYQKYDLKRYISRSKDPKEVEKATEKYFFYSNLLNFFKEEVHYADGTIVKRENIEYSKDTGEIAWNKEKDFATIKKVLSLPQVNIVKKTEEQTVGQNGGLFDNNIVSKKKVVDASKLIPIKSGLSPEKYGGYARPTIAYSVLVTYKQNNKIKNTMVGIPVLTKLEFERDPNLYLRNLGINNVSHVIKLVKYTVLEFKHKYGTYRRFIVSNQELKRANQIFVTTKQMKLISQYTTLDKNEHDSLLKNNQQLIQSIWNQFLEFMLATDLVNKKQYDELILTNNQTIEECRNIMNRVITTLSFTNINAGQKKIIFDDTLSLPIKRWQFTDSDKMVKKIIESTLIHQSITGLYETRIDLSKLGED

SEQ ID NO: 570 - protein, 1371 aa, Streptococcus sp.
  source 1..1371: note = F0441
MENKNYSIGLDIGTNSVGWSVITDDYKVPSKKMKVLGNTDKHFIKKNLIGALLFDEGTTAEARRLKRTARRRYTRRKNRLRYLQEIFSEEIGKVDSSFFHRLDDSFLIPEDKRGSKYPIFATLAEEKKYHKQFPTIYHLRKQLADSKEKTDLRLIYLALAHMIKYRGHFLYEEAFDIKNNDIQKIFNEFISIYNNTFEGNSLSGQNVQVEAIFTDKISKSAKRERVLKLFPDEKSTGLFSEFLKLIVGNQADFKKHFDLEEKAPLQFSRDTYDEDLENLLGQIGDDFADLFLVAKKLYDAILLSGILTVTNPSTKAPLSASMIERYENHQKDLASLKQFIKNNLPEKYDEVFSDQSEDGYAGYIDGKTTQETFYKYIKNLLSKFEGADYFLDKIEREDFLRKQRTFDNGSIPHQIHLQEMNAILRRQGEHYPFLKENKEKIEKILTFRIPYYVGPLARGNRDFAWLTRNSDQAIRPWNFEEIVDKASSAEDFINKMTNYDLYLPEEKVLPKHSLLYETFAVYNELTKVKFIAEGLRDYQFLDSGQKKQIVTQLFKEKRKVTEKDIIQFLHNVDGYDGIELKGIEKQFNASLSTYHDLLKIIKDKAFMDDAKNEAILENIVHTLTIFEDREMIKQRLAQYDSLFDEKVIKALTRRHYTGWGKLSAKLINGISDKQTGNTILDYLIDDGEINRNFMQLINDDGLSFKEIIQKAQVVGKTNDVKQVVQELPGSPAIKKGILQSIKIVDELVKVMGHAPESIVIEMARENQTTARGKKNSQQRYKRIEDSLKILASGLNSKILKEHPTDNIQLQNDRLFLYYLQNGKDMYTGEALDINQLSSCDIDHIIPQAFIKDDSLDNRVLTSSKDNRGKSDNVPSLEVVDKMKVFWQQLLDSKLISYRKFNNLTKAERGGLNELDKVGFIKRQLVETRQITKHVAQILDARFNKEVTEKDKKNRTVKIITLKSNLVSNFRKEFELYKVREINDYHHAHDAYLNAVVAKAILKKYPKLEPEFVYGDYQKYDLKRYISRSKDPKEIEKATEKYFFYSNLLNFFKEEVHYADGTIVKRENIEYSKDTGEIAWNKEKDFATIKKVLSLPQVNIVKKREVQTGGFSKESILPKGNSDKLIPRKTKDILWDTTKYGGFDSPVIAYSILLIADIEKGKAKKLKTVKTLVGITIMEKDAFEKNPIAFLENKGYHNVCKENILCLPKYSLFELENGRRRLLASAKELQKCNEIVLPVYLTTLLYHSKNVHKLDEPGHLEYIQKHRNEFKDLLNLVSEFSQKYVLADANLEKIKNLYADNEQADIEILANSFINLLTFTALGAPAAFKFFGKDVDRKRYTTVSEILNATLIHQSITGLYETRIDLSKLGED

SEQ ID NO: 571 - protein, 1121 aa, Streptococcus sp.
  source 1..1121: note = GMD6S
MNGLVLGLDIGIASVGVGILEKNSGKIIHANSRLFPAATADNNVERRKNRQARRLHRRKKHRGVRFQDLFEDYGLLTDFSKVSINLNPYRLRVDGLNQQLTNEELFIALKNIVKRRGISYLDDASEDGGTVSSDYGKAVEENRKLLAEQTPGQIQLERFEKYGQVRGDFTVVENGEKRRLINVFSTSAYRKEAERILRKQQEFNSKITDEFIEDCLKILTGKRKYYHGPGNEKSRTDYGRFRTDGTTLDNIFGILIGKCTFYPDEYRASKASYTAQEFNLLNDLNNLTVPTETKKLSEEQKKVIVEYAKEAKTLGASTLLKYIAKMIDASVDQIRGYRVDVNNKPEIHTFEAYRKMQSLETISVGELSRNVLDELAHILTLNTEREGIEEAINTKLKDSFSQDQVLELVQFRKNNSSLFSKGWHNFSLKLMMELIPELYETSEEQMTILTRLGKQKSKEISKRTKYIDEKELTEEIYNPVVAKSVRQAIKIINEATKKHGIFDNIVIEMARENNEEDAKKDYIKRQKANQDEKNAAMEKAAFQYNGKKELPDSIFHGQKELATKIRLWHQQGEKCLYTGKNIPISDLIHNQYKYEIDHILPLSLSFDDSLSNKVLVLATANQEKGQRTPFQALDSMDDAWSYREFKSYVKESKLLGNKKKEYLLTEEDISKIEVKQKFIERNLIDTRYSSRVVLNALQDFYKAHKFDTTISVVRGQFTSQLRRKWGLEKSRETYHHHAVDALIIAASSQLRLWKKQNNPLIAYKEGQFVDSETGEIISLSDDEYKELVFKAPYDHFVDTLSSKTFEDSILFSYQVDSKFNRKISDATIYATRKAKLDKEKSEETYVLGKIKDIYSQAGYDAFIKIYNKDKSKFLMYHKDPQTFEKVIEEILRTYPSKELNDKNKEIPCNPFEKYRQENGPIRKYSKKSNGPEIKSLKYYDNKLGNHIDITPESSDNQVVLQSLKPWRTDVYFNHQTKKYELMGLKYSDLSFEKGSGKYSISNQKYNSIKRIEGIDEQSEFKFTLYKNDLILIKDSENNEQKLFRFNSRNDTAKHYIELKPYDKAKFDGEQELITILGNVAKGGRCLKGLNKSNISIFKVKTDVLGKKHIIKKEGDEPKLKF

SEQ ID NO: 572 - protein, 1375 aa, Streptococcus sp.
  source 1..1375: note = M334
MSNKSYSIGLDIGTNSVGWAVITDDYKVPSKKMKVLGNTDKHFIKKNLIGALLFDEGTTAEDRRLKRTARRRYTRRKNRLRYLQEIFSQEISKVDSSFFHRLDDFFLVPEDKRGSKYPIFATLVEEKEYHKKFPTIYHLRKHLADSKEKTDLRLIYLALAHMIKYRGHFLYEESFDIKNNDIQKIFSEFISIYDNTFEGKSLSGQNAQVEAIFTDKISKSTKRERVLKLFPDEKSTGLFSEFLKLIVGNQADFKKHFDLEEKAPLQFSKDTYDEDLENLLGQIGDDFADLFLVAKKLYDAILLSGILTVKDLSTKAPLSASMIERYENHQKDLAALKQFIQNNLQEKYDEVFSDQSKDGYAGYIDGKTTQEAFYKYIKNLLSKFEGADYFLDKIEREDFLKKQRTFDNGSIPHQIHLQEMNAIIRRQGEHYPFLQENKEKIEKILTFRIPYYVGPLARGNGDFAWLTRNSDQAIRPWNFEEIVDQASSAEDFINKMTNYDLYLPEEKVLPKHSLLYETFAVYNELTKVKFIAEGLTRYQFLDKKQKKDIFDTFFKAENKRKVTEKDIIHYLHNVDGYDGIELKGIEKQFNASLSTYHDLLKIIKDKAFMDDSKNEEILENIIHTLTIFEDREMIKQRLAQYDSLFDEKVIKALTRRHYTGWGKLSAKLINGIRDKKSGKTILDYLIDDGEINRNFMQLIHDDGLSFKEIIQKAQVFGKTNDVKQVVQELPGSPAIKKGILQSIKIVDELVKVMGHAPESIVIEMARENQTTARGKKNSQQRYKRIEDSLKNLASGLDSNILKENPTDNIQLQNDRLFLYYLQNGRDMYTGKPLEINQLSNYDIDHIIPQAFIKDDSLDNRVLTSSKDNRGKSDNVPSLEVVEKMKAFWQQLLDSKLISERKFNNLTKAERERGGLNELDKVGFIKRQLVETRQITKHVAQFLDARFNKEVTEKDKKNRNVKIITLKSNLVSNFRKEFGLYKVREINDYHHAHDAYLNAVLAKAILKKYPKLEPEFVYGDYQKYDLQRYISKSREPKEVEKATQKYFFYSNLLNFFKEEVHYADGTIVKRENIEYSKDTGEIAWNKEKDFATVKKVLSLPQVNIVKKTEVQTGGFSKESILPKGNSDKLIPRKTKEILWDTTKYGGFDSPVIAYSILLIADIEKGKAKKLKTVKTLVGITIMEKATFEKNPITFLENKGYHNVRKENILCLPKYSLFELESGRRRMLASAKELQKGNEIVLPVYLTTLLYHSKNVHKLDEPEHLEYIQKHRYEFKDLLNLVSEFSQKYVLADANLEKIKNLYADNEQADIEILANSFINLLTFTALGAPAAFKFLGKDVDRKRYTTVSEILNATLIHQSITGLYETRIDLSKLGED

SEQ ID NO: 573 - protein, 1371 aa, Streptococcus sp.
  source 1..1371: note = oral taxon 056 str. F0418
MNNNNYSIGLDIGTNSVGWAVITDDYKVPSKKMRVLGNTDKRFIKKNLIGALLFDEGTTAEDRRLKRTARRRYTRRKNRLRYLQEIFAEEMSKVDSSFFHRLDDSFLVPEDKSGSKYPIFATLAEEKEYHKKFPTIYHLRKHLADSKEKADLRLIYLALAHITKYRGHFLYEEAFDIKNNDIQKIFNEFINIYDNTFEGSSLSGQNAQVEAIFTGKISKSVKREHVLKLFPDEKSTGLFSEFLKLIVGNQADFKKHFDLEEKASLQFSKDTYDEDLENLLGQIGDDFADLFLVAKKLYDAILLSGILTVTDPSTKAPLSASMIERYENHQEDLAALKQFIKNNLPEKYAEVFSDQSKDGYAGYIDGKTTQEAFYKYIKNLLSKFEGADYFLDKIEREDFLRKQRTFDNGSIPHQIHLQEMNAILRRQGEHYPLLKENKEKIEKILTFRIPYYVGPLARGNRDFAWLTRNSDQAIRPWNFEEIVDKASSAESFINKMTNYDLYLPEEKVLPKHSLLYETFAVYNELTKVKFIAEGLRDYQFFDSGQKKQIVNQLFKEKRKVTEKDIIHYLHNVDGYDGIELKGIEKQFNASLSTYHDLLKIIKDKEFMDNHKNQEILENIVHTLTIFEDREMIKQRLAQYDSIFDEKVIKALTRRHYTGWGKLSAKLINGICDKKTGKTILDYLIDDGYNNRNFMQLINDDGLSFKEIIQKAQVVGKTDDLTQVVRELSGSPAIKKGILQSIKIVDELVKIMGYAPESIVIEMARENQTTAKGKKNSQQRYKRIEDALKNLAPGLDSTISKENPTDNIQLQNDRLFLYYLQNGKDMYTGEALDINQLSSYDIDHIIPQAFIKDDSLDNRVLTSSKDNRGKSDNVPSLEVVKKRKAFWQQLLDSKLISERKFNNLTKAERGGLDERDKVGFIKRQLVETRQITKHVARILDARFNTEVSEKNQKIRSVKIITLKSNLVSNFRKEFKLYKVREINDYHHAHDAYLNAVVAKAILKKYPKLEPEFVYGDYQKYDLKRYISKSKDPKEVEKATEKYFFYSNLLNFFKEEVHYADGTIVKRENIEYSKDTGEIAWNKEKDFVTIKKVLSYPQVNIVKKREVQTGGFSKESILPKGNSDKLIPRKTKDILWDTTKYGGFDSPVIAYSILLIADIEKGKAKKLKTVKTLVGITIMEKAAFEKNPITFLENKGYHNVRKENILCLPKYSLFELENGRRRLLASAKELQKGNEIVLPVYLTTLLYHSKNVHKLDEPEHLEYIQKHRYEFKDLLNLVSEFSQKYVLAEANLEKIKSLYVDNEQADIEILANSFINLLTFTALGAPAAFKFFGKDVDRKRYTTVSEILNATLIHQSITGLYETRIDLSKLGED

SEQ ID NO: 574 - protein, 1420 aa, Streptococcus sp.
  source 1..1420: note = oral taxon 071 str. 73H25AP
MAKFNKNYSIGLDIGVSSVGYAVVTEDYRVPAFKFKVLGNTEKEKIKKNLIGSTTFVPAQSAQGTRVFRVNRRRIDRRNHRIAYLRDIFQKEIEKIDKNFYRRLDESFRVLGDKSEDIQIKQPFFGNKELETAYHKKYPTIYHLRKHLADADKNSPVADIREVYMVLSHILKYRGHFLTLGKIDPNNINMQNSWIDFIESCQDAFDLEISDESKTIAAIFKSSENRQEKVKQILSYFQQELLKKDKSIFKQLLQLLFGLKTKFKDCFELEEEPDLNFSKENYDENLENLLGALEEDFSDVFAKLKILRDTILLSSMLTYTGATHARFSATMVERYEEHRKDLQRFKSFVKQNLSEQDYLDIFGRKTPTGFDVDKETKGYVGYISNKMVLTNPQKQKTIQQNFYDYISGKITGIEGAECFLNKISDGTFLRKLRTTDNGAIPNQIHAYELEKIIERQGRDYPFLLENKDKLLSILTFKIPYYVGPLAKGNNSRFAWIKRTTSQDVLDDNDEDTRNGKIRPWNYHKLINMDETRDAFIINLIGNDIILLNEKVLPKRSLIYEEVMLQNELTRVKYKDKYGKIHFFNSELRQEIINNLFKTNSKRVSSAMLLSYLENFTNLQAVEIVSGIEKGKSLNSTLKTYNDLKTIFSEELLDSEIYQKELEEIIKVITVFDDKKSIKNYLTKYFGHLEFLNEEKINQLSKLRYTGWGRYSGKLLLGIRDEDTGFNLMQFLRNDDENRNLTQLISDTTLSFDSAIKAIQSKSTVEDDVFEEIKNLAGSPAIKRGILNSIKIVDELVQIIGYPPQNIIIEMARENMTTEEGQKKAKTRKSKLESALKNIEDSVLESGKVPHSDEQLQSEKLYLYYLQNGKDMYSLDKTGSPTPLYRDQLDQYEVDHIIPYSFLPIDSIDNKVLTHRENNQRKLNNIPDKETVANMKPFWEKLYNAKLISQTKYQRLTTSERTPDGVLTESMKAGFIERQLVETRQIIKHVARILDNRFSDTKIITLKSQLVTNFRNTFHIAKIRELNDYHHAHDAYLAVVVGQTLLKAYPKLAPELIYGHHAHFNRHEENKATLRKHLYSNIMRFFNNPDSKVSKDIWDCNRDLPIVKDVIYNSQINFVKRTMIKKGAFYNQNPVGKLNKQIAANNRYPLKTKVSSLDTSIYGGYGPMNSALSIIIIAERFNEKKGKIETVKEFHDIFIIDYEKFNNNPFQFLNNVSEEGFLKKNDLNRVLAFYRISKYSLMQKIDGTRMLFESKSNLHKVTQFKLTKTQNELFFHMKRLLTKSNLMDLKSESAIKESQNFIQTHQNEFDNIADRLSNYSQKMLGETKSLQTLINGYNERPIKQIDNNEETIRYYYDNFIKMFSFVKSGAPKDIINFFNDKYTVPRMRPKPDRKMLDATLIHQSITGLYETRIDLSKLGED

SEQ ID NO: 575 - protein, 1122 aa, Streptococcus suis
  source 1..1122: note = 89/1591
MSNGKILGLDIGIASVGVGVIDAQTGEIIHASSRIFPSANAANNAERRTFRGSRRLIRRKKHRIKRLDDLFNDFHINLDGEMSTDNPYVLRVKGLSQKLTVEELYISIKNIMKRRGISYLDDAESDNEAGRSDYAKAIERNRQLLTSKTPGEIQLERLEKYGQLRGNFTIIDEEGQSQQIINVFSTSDYVKEVEKILDCQKMYHKFISDEFCDKLIELLREKRKYYVGPGNEKSRTDYGIYRTDGTTLENLFGILIGKCTFYPDQYRSSRASYTAQEFNFLNDLNNLTVPTETKKLSQEQKEFLVNYAKETSVLGAGKILQQIAKLADCKVEDIRGYRLDNKDKPELHTFETYRAMKGLVPLVDIGVLSREQLDILADILTLNTDFEGIREALKKQLPNVFDEKQVKGLASFRKSKSQLFAKGWHNLSQKIMLEVIPELYATSDEQMTILTRLGKFEKSSVAEYPSSINVDEITDEIYNPVVAKSIRQTIKIINASIKKWGEFDQIVIEMPRDRNEDEEKKRIADGQKANAKEKADSILRAAELYCAGKVLPDYVYNGHNQLATKIRLWYQQGERCIYTGQPISIHDLIHNQNQYEIDHILPLSLTFDDSLSNKVLVLATANQEKAQRTPYNYLKSATSAWSYREFKDYVTKRKGIGKKKCEYLTFEEDINGFEVRSKFIQRNLVDTRYASKVILNALQDYFKISGIQTKVSVVRGQFTSQLRHKWGIEKTRETYHHHAVDALIIAASSQLRLWKKQESPLVVDYQEGRQVDLETGEILELTDEQYKELVYQPPYQGFVNTISSSAFDNEILFSYQVDSKVNRKISDATIYATRNAQLGKDKTEGIYVLGKIKDIYTQAGYEAFLKRYTKDKTSFLMYHKDLDTWEKVIEIILRDYREYDEKGKEIGNPFERYRRENGYVKKYSRKGNGTAIKSLKYYDNKLGNHIDITPENSRNAVVLQSLKPWRTDVYFNKETGKYEFLGIKYSDLSFEKGTGEYGISQEKYDSIKIAEGVAKKSIFKFTLYKQDLLFIKDIENNFGKLLRFTSKNDTSKHYVELKPYDKNKFGTEEPLLPVLGNVAKSGQCIKGLNKSNISIYKVRTDILGYRHFIKQEGEHPQLKFKK

SEQ ID NO: 576 - protein, 1122 aa, Streptococcus suis
MSNGKILGLDIGIASVGVGVIDAQTGEIIHASSRIFPSANAANNAERRTFRGSRRLIRRKKHRIKRLDDLFNDFHINLDGEMSTDNPYVLRVKGLSQKLTVEELYISIKNIMKRRGISYLDDAESDNEAGRSDYAKAIERNRQLLTSKTPGEIQLERLEKYGQLRGNFTIIDEEGQSQQIINVFSTSDYVKEVEKILDCQKMYHKFISDEFCDKLIELLREKRKYYVGPGNEKSRTDYGIYRTDGTTLENLFGILIGKCTFYPDQYRSSRASYTAQEFNFLNDLNNLTVPTETKKLSQEQKEFLVNYAKETSVLGAGKILQQIAKLADCKVEDIRGYRLDNKDKPELHTFETYRAMKGLVPLVDIGVLSREQLDILADILTLNTDFEGIREALKKQLPNVFDEKQVKGLASFRKSKSQLFAKGWHNLSQKIMLEVIPELYATSDEQMTILTRLGKFEKSSVAEYPSSINVDEITDEIYNPVVAKSIRQTIKIINASIKKWDEFDQIVIEMPRDRNEDEEKKRIADGQKANAKEKADSILRAAELYCAGKVLPDYVYNGHNQLATKIRLWYQQGERCIYTGQPISIHDLIHNQNQYEIDHILPLSLTFDDSLSNKVLVLATANQEKAQRTPYNYLKSATSAWSYREFKDYVTKRKGIGKKKCEYLTFEEDINGFEVRSKFIQRNLVDTRYASKVILNALQDYFKISGIQTKVSVVRGQFTSQLRHKWGIEKTRETYHHHAVDALIIAASSQLRLWKKQESPLVVDYQEGRQVDLETGEILELTDEQYKELVYQPPYQGFVNTISSSAFDNEILFSYQVDSKVNRKISDATIYATRNAQLGKDKTEGIYVLGKIKDIYTQAGYEAFLKRYTKDKTSFLMYHKDLDTWEKVIEIILRDYREYDEKGKEIGNPFERYRRENGYVKKYSRKGNGTAIKSLKYYDNKLGNHIDITPENSRNAVVLQSLKPWRTDVYFNKETGKYEFLGIKYSDLSFEKGTGEYGISQEKYDSIKIAEGVAKKSIFKFTLYKQDLLFIKDIENNFGKLLRFTSKNDTSKHYVELKPYDKNKFGTEEPLLPVLGNVAKSGQCIKGLNKSNISIYKVRTDILGYRHFIKQEGEHPQLKFKK

SEQ ID NO: 577 - protein, 1381 aa, Streptococcus suis
MVKKKYAIGIDIGTNSVGWSIVTDDYKVPSKKMKVFGNTEKRYIKKNLLGTLLFDEGNTAENRRLKRTARRRYTRRRNRILYLQEIFAEEINKIDDSFFQRLDDSFLIVEDKQGSKHPIFGTLQEEKEYHKQFPTIYHLRKQLADSSQKADIRLIYLALAHIIKYRGHFLFEGDLKSENKDVQHLFNDFVEMFDKTVEGSYLSENLPNVADVLVEKVSKSRRLENILHYFPNEKKNGLFGNFLALALGLQPNFKTNFELAEDAKIQFSKETYEEDLEELLGKIGDDYADLFIATKSLYDGILLAGILSTTDSTTKAPLSSSMVNRYEEHQKDLALLKNFIHQNLSDSYKEVFNDKLKDGYAGYIEGKTTQENFYRFIKKAIEKIEGSNYFIDKIDREDFLRKQRTFDNGSIPHQIHLQEMHAIIRRQAEFYPFLVENQDKIEKILTFRIPYYVGPLARGKSEFAWLNRKSDEKIRPWNFDEMVDKETSAENFITRMTNYDRYLPDQKVLPKHSLLYEKFAVYNELTKVKFIAEGMRDYQFLDSGQKKDIVKTLFKTKRKVTAKDIKAYLENSNGYAGVELKGLEEQFNASLPTYHDLLKILRDKAFIDAEENQEILEDIVLTLTLFEDREMIRKRLEKYKDILTEEQRKKLERRHYTGWGRLSAKLINGILDKVTRKTILGYLIDDGTSNRNFMQLINDDTLSFVDEIRLAQGSGEAEDYRAEVQNLAGSPAIKKGILQSLKIVDELIEVMGYEPEHIVVEMARENQFTNQGRRNSQQRINRLENALKDFGSKILEEQKPYGVSKVNNIHLQSDRLFLYYLQNGKDMYTDEELDIDHLSEYDIDHIIPQAFIKDDSLDNKVLTKSAKNRGKSDDVPSMEIVHNRKNFWRQLLKSKLISQRKFDNLTKAERGGLTNEDKARFIQRQLVETRQITKHVARMLDTRFNTKLDEAGNRIRDPKVNIITLKSNLVSQFRKDYQLYKIREINNYHHAHDAYINAVVATALLKKYPQLAPEFVYGEYPTYNSYNSRKSATEKVLFYSNIMNFFKRIVVHSKTGEVRIRPVIEVNKETGEIVWDKKSDFRTVRKVLSYPQVNVVKKTEVQNHGLDRGKPKGFYNANLSPRPKEGSVENLVPAKQSFDTKRYGGYAGISNSYAVLVNGIIEKGKKKSKAEVTEFQGISILARKDFDKNPKQYLLNLGYKDIKSIIKLPKYSLFELENGSRRMLASILSTNNKRGEIHKGNEMYLPDKFVTLLYHAMRVNRTLEPGHKKYVETHRHVFDELLIYILEYNEKIVGAKANGKRIVEAYSARKDTDNLEELCNSFINLLNLTALGSAVDFEFLGTKIPRYRDYTPSSLLKATLIHQSVTGLYETRIDLSKLGGD

SEQ ID NO: 578 - protein, 1122 aa, Streptococcus suis; identical to SEQ ID NO: 575

SEQ ID NO: 579 - protein, 1388 aa, Streptococcus thermophilus
MTKPYSIGLDIGTNSVGWAVITDNYKVPSKKMKVLGNTSKKYIKKNLLGVLLFDSGITAEGRRLKRTARRRYTRRRNRILYLQEIFSTEMATLDDAFFQRLDDSFLVPDDKRDSKYPIFGNLVEEKVYHDEFPTIYHLRKYLADSTKKADLRLVYLALAHMIKYRGHFLIEGEFNSKNNDIQKNFQDFLDTYNAIFESDLSLENSKQLEEIVKDKISKLEKKDRILKLFPGEKNSGIFSEFLKLIVGNQADFRKCFNLDEKASLHFSKESYDEDLETLLGYIGDDYSDVFLKAKKLYDAILLSGFLTVTDNETEAPLSSAMIKRYNEHKEDLALLKEYIRNISLKTYNEVFKDDTKNGYAGYIDGKTNQEDFYVYLKNLLAEFEGADYFLEKIDREDFLRKQRTFDNGSIPYQIHLQEMRAILDKQAKFYPFLAKNKERIEKILTFRIPYYVGPLARGNSDFAWSIRKRNEKITPWNFEDVIDKESSAEAFINRMTSFDLYLPEEKVLPKHSLLYETFNVYNELTKVRFIAESMRDYQFLDSKQKKDIVRLYFKDKRKVTDKDIIEYLHAIYGYDGIELKGIEKQFNSSLSTYHDLLNIINDKEFLDDSSNEAIIEEIIHTLTIFEDREMIKQRLSKFENIFDKSVLKKLSRRHYTGWGKLSAKLINGIRDEKSGNTILDYLIDDGISNRNFMQLIHDDALSFKKKIQKAQIIGDEDKGNIKEVVKSLPGSPAIKKGILQSIKIVDELVKVMGGRKPESIVVEMARENQYTNQGKSNSQQRLKRLEKSLKELGSKILKENIPAKLSKIDNNALQNDRLYLYYLQNGKDMYTGDDLDIDRLSNYDIDHIIPQAFLKDNSIDNKVLVSSASNRGKSDDFPSLEVVKKRKTFWYQLLKSKLISQRKFDNLTKAERGGLLPEDKAGFIQRQLVETRQITKHVARLLDEKFNNKKDENNRAVRTVKIITLKSTLVSQFRKDFELYKVREINDFHHAHDAYLNAVIASALLKKYPKLEPEFVYGDYPKYNSFRERKSATEKVYFYSNIMNIFKKSISLADGRVIERPLIEVNEETGESVWNKESDLATVRRVLSYPQVNVVKKVEEQNHGLDRGKPKGLFNANLSSKPKPNSNENLVGAKEYLDPKKYGGYAGISNSFAVLVKGTIEKGAKKKITNVLEFQGISILDRINYRKDKLNFLLEKGYKDIELIIELPKYSLFELSDGSRRMLASILSTNNKRGEIHKGNQIFLSQKFVKLLYHAKRISNTINENHRKYVENHKKEFEELFYYILEFNENYVGAKKNGKLLNSAFQSWQNHSIDELCSSFIGPTGSERKGLFELTSRGSAADFEFLGVKIPRYRDYTPSSLLKDATLIHQSVTGLYETRIDLAKLGEG

SEQ ID NO: 580 - protein, 1128 aa, Streptococcus thermophilus
MSDLVLGLDIGIGSVGVGILNKVTGEIIHKNSRIFPAAQAENNLVRRTNRQGRRLTRRKKHRIVRLNRLFEESGLITDFTKISINLNPYQLRVKGLTDELSNEELFIALKNMVKHRGISYLDDASDDGNSSVGDYAQIVKENSKQLETKTPGQIQLERYQTYGQLRGDFTVEKDGKKHRLINVFPTSAYRSEALRILQTQQEFNPQITDEFINRYLEILTGKRKYYHGPGNEKSRTDYGRYRTSGETLDNIFGILIGKCTFYPEEFRAAKASYTAQEFNLLNDLNNLTVPTETKKLSKEQKNQIINYVKNEKAMGPAKLFKYIAKLLSCDVADIKGYRIDKSGKAEIHTFEAYRKMKTLETLDIEQMDRETLDKLAYVLTLNTEREGIQEALEHEFADGSFSQKQVDELVQFRKANSSIFGKGWHNFSVKLMMELIPELYETSEEQMTILTRLGKQKRLRLQIKQNISNKTKYIDEKLLTEEIYNPVVAKSVRQAIKIVNAAIKEYGDFDNIVIEMARETNEDDEKKAIQKIQKANKDEKDAAMLKAANQYNGKAELPHSVFHGHKQLATKIRLWHQQGERCLYTGKTISIHDLINNPNQFEVDHILPLSITFDDSLANKVLVYATANQEKGQRTPYQALDSMDDAWSFRELKAFVRESKTLSNKKKEYLLTEEDISKFDVRKKFIERNLVDTRYASRVVLNALQEHFRAHKIDTKVSVVRGQFTSQLRRHWGIEKTRDTYHHHAVDALIIAASSQLNLWKKQKNTLVSYSEEQLLDIETGELISDDEYKESVFKAPYQHFVDTLKSKEFEDSILFSYQVDSKFNRKISDATIYATRQAKVGKDKKDETYVLGKIKDIYTQDGYDAFMKIYKKDKSKFLMYRHDPQTFEKVIEPILENYPNKQMNEKGKEVPCNPFLKYKEEHGYIRKYSKKGNGPEIKSLKYYDSKLLGNPIDITPENSKNKVVLQSLKPWRTDVYFNKATGKYEILGLKYADLQFEKGTGTYKISQEKYNDIKKKEGVDSDSEFKFTLYKNDLLLVKDTETKEQQLFRFLSRTLPKQKHYVELKPYDKQKFEGGEALIKVLGNVANGGQCIKGLAKSNISIYKVRTDVLGNQHIIKNEGDKPKLDF

SEQ ID NO: 581 - protein, 1121 aa, Streptococcus thermophilus
MSDLVLGLDIGIGSVGVGILNKVTGEIIHKNSRIFPAAQAENNLVRRTNRQGRRLTRRKKHRIVRLNRLFEESGLITDFTKISINLNPYQLRVKGLTDELSNEELFIALKNMVKHRGISYLDDASDDGNSSVGDYAQIVKENSKQLETKTPGQIQLERYQTYGQLRGDFTVEKDGKKHRLINVFPTSAYRSEALRILQTQQEFNPQITDEFINRYLEILTGKRKYYHGPGNEKSRTDYGRYRTSGETLDNIFGILIGKCTFYPDEFRAAKASYTAQEFNLLNDLNNLTVPTETKKLSKEQKNQIINYVKNEKAMGPAKLFKYIAKLLSCDVADIKEYRIDKSGKAEIHTFEAYRKMKTLETLDIEQMDRETLDKLAYVLTLNTEREGIQEALEHEFADGSFSQKQVDELVQFRKANSSIFGKGWHNFSVKLMMELIPELYETSEEQMTILTRLGKQKTTSSSNKTKYIDEKLLTEEIYNPVVAKSVRQAIKIVNAAIKEYGDFDNIVIEMARETNEDDEKKAIQKIQKANKDEKDAAMLKAANQYNGKAELPHSVFHGHKQLATKIRLWHQQGERCLYTGKTISIHDLINNSNQFEVDHILPLSITFDDSLANKVLVYATANQEKGQRTPYQALDSMDDAWSFRELKAFVRESKTLSNKKKEYLLTEEDISKFDVRKKFIERNLVDTRYASRVVLNALQEHFRAHKIDTKVSVVRGQFTSQLRRHWGIEKTRDTYHHHAVDALIIAASIQLNLWKKQKNTLVSYSEDQLLDIETGELISDDEYKESVFKAPYQHFVDTLKSKEFEDSILFSYQVDSKFNRKISDATIYATRQAKVGKDKADETYVLGKIKDIYTQDGYDAFMKIYKKDKSKFLMYRHDPQTFEKVIEPILENYPNKQINEKGKEVPVNPFLKYKEEHGYIRKYSKKGNGPEIKSLKYYDSKLGNHIDITPKDSNNKVVLQSVSPWRADVYFNKTTGKYEILGLKYADLQFEKGTGTYKISQEKYNDIKKKEGVDSDSEFKFTLYKNDLLLVKDTETKEQQLFRFLSRTMPKQKHYVELKPYDKQKFEGGEALIKVLGNVANSGQCKKGLGKSNISIYKVRTDVLGNQHIIKNEGDKPKLDF

SEQ ID NO: 582 - protein, 1388 aa, Streptococcus thermophilus
MTKPYSIGLDIGTNSVGWAVTTDNYKVPSKKMKVLGNTSKKYIKKNLLGVLLFDSGITAEGRRLKRTARRRYTRRRNRILYLQEIFSTEMATLDDAFFQRLDDSFLVPDDKRDSKYPIFGNLVEEKAYHDEFPTIYHLRKYLADSTKKADLRLVYLALAHMIKYRGHFLIEGEFNSKNNDIQKNFQDFLDTYNAIFESDLSLENSKQLEEIVKDKISKLEKKDRILKLFPGEKNSGIFSEFLKLIVGNQADFRKCFNLDEKASLHFSKESYDEDLETLLGYIGDDYSDVFLKAKKLYDAILLSGFLTVTDNETEAPLSSAMIKRYNEHKEDLALLKEYIRNISLKTYNEVFKDDTKNGYAGYIDGKTNQEDFYVYLKKLLAEFEGADYFLEKIDREDFLRKQRTFDNGSIPYQIHLQEMRAILDKQAKFYPFLAKNKERIEKILTFRIPYYVGPLARGNSDFAWSIRKRNEKITPWNFEDVIDKESSAEAFINRMTSFDLYLPEEKVLPKHSLLYETFNVYNELTKVRFIAESMRDYQFLDSKQKKDIVRLYFKDKRKVTDKDIIEYLHAIYGYDGIELKGIEKQFNSSLSTYHDLLNIINDKEFLDDSSNEAIIEEIIHTLTIFEDREMIKQRLSKFENIFDKSVLKKLSRRHYTGWGKLSAKLINGIRDEKSGNTILDYLIDDGISNRNFMQLIHDDALSFKKKIQKAQIIGDEDKGNIKEVVKSLPGSPAIKKGILQSIKIVDELVKVMGGRKPESIVVEMARENQYTNQGKSNSQQRLKRLEKSLKELGSKILKENIPAKLSKIDNNALQNDRLYLYYLQNGKDMYTGDDLDIDRLSNYDIDHIIPQAFLKDNSIDNKVLVSSASNRGKSDDVPSLEVVKKRKTFWYQLLKSKLISQRKFDNLTKAERGGLSPEDKAGFIQRQLVETRQITKHVARLLDEKFNNKKDENNRAVRTVKIITLKSTLVSQFRKDFELYKVREINDFHHAHDAYLNAVVASALLKKYPKLEPEFVYGDYPKYNSFRERKSATEKVYFYSNIMNIFKKSISLADGRVIERPLIEVNEETGESVWNKESDLATVRRVLSYPQVNVVKKVEEQNHGLDRGKPKGLFNANLSSKPKPNSNENLVGAKEYLDPKKYGGYAGISNSFTVLVKGTIEKGAKKKITNVLEFQGISILDRINYRKDKLNFLLEKGYKDIELIIELPKYSLFELSDGSRRMLASILSTNNKRGEIHKGNQIFLSQKFVKLLYHAKRISNTINENHRKYVENHKKEFEELFYYILEFNENYVGAKKNGKLLNSAFQSWQNHSIDELCSSFIGPTGSERKGLFELTSRGSAADFEFLGVKIPRYRDYTPSSLLKDATLIHQSVTGLYETRIDLAKLGEG

SEQ ID NO: 583 - protein, 1121 aa, Streptococcus thermophilus
MSDLVLGLDIGIGSVGVGILNKVTGEIIHKNSRIFPAAQAENNLVRRTNRQGRRLARRKKHRRVRLNRLFEESGLITDFTKISINLNPYQLRVKGLTDELSNEELFIALKNMVKHRGISYLDDASDDGNSSVGDYAQIVKENSKQLETKTPGQIQLERYQTYGQLRGDFTVEKDGKKHRLINVFPTSAYRSEALRILQTQQEFNPQITDEFINRYLEILTGKRKYYHGPGNEKSRTDYGRYRTSGETLDNIFGILIGKCTFYPDEFRAAKASYTAQEFNLLNDLNNLTVPTETKKLSKEQKNQIINYVKNEKAMGPAKLFKYIAKLLSCDVADIKGYRIDKSGKAEIHTFEAYRKMKTLETLDIEQMDRETLDKLAYVLTLNTEREGIQEALEHEFADGSFSQKQVDELVQFRKANSSIFGKGWHNFSVKLMMELIPELYETSEEQMTILTRLGKQKTTSSSNKTKYIDEKLLTEEIYNPVVAKSVRQAIKIVNAAIKEYGDFDNIVIEMARETNEDDEKKAIQKIQKANKDEKDAAMLKAANQYNGKAELPHSVFHGHKQLATKIRLWHQQGERCLYTGKTISIHDLINNSNQFEVDHILPLSITFDDSLANKVLVYATANQEKGQRTPYQALDSMDDAWSFRELKAFVRESKTLSNKKKEYLLTEEDISKFDVRKKFIERNLVDTRYASRVVLNALQEHFRAHKIDTKVSVVRGQFTSQLRRHWGIEKTRDTYHHHAVDALIIAASSQLNLWKKQKNTLVSYSEDQLLDIETGELISDDEYKESVFKAPYQHFVDTLKSKEFEDSILFSYQVDSKFNRKISDATIYATRQAKVGKDKADETYVLGKIKDIYTQDGYDAFMKIYKKDKSKFLMYRHDPQTFEKVIEPILENYPNKQINEKGKEVPCNPFLKYKEEHGYIRKYSKKGNGPEIKSLKYYDSKLGNHIDITPKDSNNKVVLQSVSPWRADVYFNKTTGKYEILGLKYADLQFEKGTGTYKISQEKYNDIKKKEGVDSDSEFKFTLYKNDLLLVKDTETKEQQLFRFLSRTMPKQKHYVELKPYDKQKFEGGEALIKVLGNVANSGQCKKGLGKSNISIYKVRTDVLGNQHIIKNEGDKPKLDF

SEQ ID NO: 584 - protein, 1122 aa, Streptococcus thermophilus
MSDLVLGLDIGIGSVGVGILNKVTGEIIHKNSRIFPAAQAENNLVRRTNRQGRRLTRRKKHRIVRLNRLFEESGLITDFTKISINLNPYQLRVKGLTDELSNEELFIALKNMVKHRGISYLDDASDDGNSSVGDYAQIVKENSKQLETKTPGQIQLERYQTYGQLRGDFTVEKDGKKHRLINVFPTSAYRSEALRILQTQQEFNSQITDEFINRYLEILTGKRKYYHGPGNEKSRTDYGRYRTNGETLDNIFGILIGKCTFYPDEFRAAKASYTAQEFNLLNDLNNLTVPTETKKLSKEQKNQIINYVKNEKVMGPAKLFKYIAKLLSCDVADIKGHRIDKSGKAEIHTFEAYRKMKTLETLDIEQMDRETLDKLAYVLTLNTEREGIQEALEHEFADGSFSQKQVDELVQFRKANSSIFGKGWHNFSVKLMMELIPELYETSEEQMTILTRLGKQKTTSSSNKTKYIDEKLLTEEIYNPVVAKSVRQAIKIVNAAIKEYGDFDNIVIEMARETNEDDEKKAIQKIQKANKDEKDAAMLKAANQYNGKAELPHSVFHGHKQLATKIRLWHQQGERCLYTGKTISIHDLINNPNQFEVDHILPLSITFDDSLANKVLVYATANQEKGQRTPYQALDSMDDAWSFRELKAFVRESKTLSNKKKEYLLTEEDISKFDVRKKFIERNLVDTRYASRVVLNALQEHFRAHKIDTKVSVVRGQFTSQLRRHWGIEKTRDTYHHHAVDALIIAASSQLNLWKKQKNTLVSYSEEQLLDIETGELISDDEYKESVFKAPYQHFVDTLKSKEFEDSILFSYQVDSKFNRKISDATIYATRQAKVGKDKKDETYVLGKIKDIYTQDGYDAFMKIYKKDKSKFLMYRHDPQTFEKVIEPILENYPNKEMNEKGKEVPCNPFLKYKEEHGYIRKYSKKGNGPEIKSLKYYDSKLLGNPIDITPENSKNKVVLQSLKPWRTDVYFNKNTGKYEILGLKYADLQFEKKTGTYKISQEKYNGIMKEEGVDSDSEFKFTLYKNDLLLVKDTETKEQQLFRFLSRTMPNVKYYVELKPYSKDKFEKNESLIEILGSADKSGRCIKGLGKSNISIYKVRTDVLGNQHIIKNEGDKPKLDF

SEQ ID NO: 585 - protein, 1388 aa, Streptococcus thermophilus
MTKPYSIGLDIGTNSVGWAVITDNYKVPSKKMKVLGNTSKKYIKKNLLGVLLFDSGITAEGRRLKRTARRRYTRRRNRILYLQEIFSTEMATLDDAFFQRLDDSFLVPDDKRDSKYPIFGNLVEEKAYHDEFPTIYHLRKYLADSTKKADLRLVYLALAHMIKYRGHFLIEGEFNSKNNDIQKNFQDFLDTYNAIFESDLSLENSKQLEEIVKDKISKLEKKDRILKLFPGEKNSGIFSEFLKLIVGNQADFRKCFNLDEKASLHFSKESYDEDLETLLGYIGDDYSDVFLKAKKLYDAILLSGFLTVTDNETEAPLSSAMIKRYNEHKEDLALLKEYIRNISLKTYNEVFKDDTKNGYAGYIDGKTNQEDFYVYLKNLLAEFEGADYFLEKIDREDFLRKQRTFDNGSIPYQIHLQEMRAILDKQAKFYPFLAKNKERIEKILTFRIPYYVGPLARGNSDFAWSIRKRNEKITPWNFEDVIDKESSAEAFINRMTSFDLYLPEEKVLPKHSLLYETFNVYNELTKVRFIAESMRDYQFLDSKQKKDIVRLYFKDKRKVTDKDIIEYLHAIYGYDGIELKGIEKQFNSSLSTYHDLLNIINDKEFLDDSSNEAIIEEIIHTLTIFEDREMIKQRLSKFENIFDKSVLKKLSRRHYTGWGKLSAKLINGIRDEKSGNTILDYLIDDGISNRNFMQLIHDDALSFKKKIQKAQIIGDEDKGNIKEVVKSLPGSPAIKKGILQSIKIVDELVKVMGGRKPESIVVEMARENQYTNQGKSNSQQRLKRLEKSLKELGSKILKENIPAKLSKIDNNALQNDRLYLYYLQNGKDMYTGDDLDIDRLSNYDIDHIIPQAFLKDNSIDNKVLVSSASNRGKSDDFPSLEVVKKRKTFWYQLLKSKLISQRKFDNLTKAERGGLLPEDKAGFIQRQLVETRQITKHVARLLDEKFNNKKDENNRAVRTVKIITLKSTLVSQFRKDFELYKVREINDFHHAHDAYLNAVIASALLKKYPKLEPEFVYGDYPKYNSFRERKSATEKVYFYSNIMNIFKKSISLADGRVIERPLIEVNEETGESVWNKESDLATVRRVLSYPQVNVVKKVEEQNHGLDRGKPKGLFNANLSSKPKPNSNENLVGAKEYLDPKKYGGYAGISNSFAVLVKGTIEKGAKKKITNVLEFQGISILDRINYRKDKLNFLLEKGYKDIELIIELPKYSLFELSDGSRRMLASILSTNNKRGEIHKGNQIFLSQKFVKLLYHAKRISNTINENHRKYVENHKKEFEELFYYILEFNENYVGAKKNGKLLNSAFQSWQNHSIDELCSSFIGPTGSERKGLFELTSRGSAADFEFLGVKIPRYRDYTPSSLLKDATLIHQSVTGLYETRIDLAKLGEG

SEQ ID NO: 586 - protein, 1121 aa, Streptococcus thermophilus
MSDLVLGLDIGIGSVGVGILNKVTGEIIHKNSRIFPAAQAENNLVRRTNRQGRRLTRRKKHRRVRLNRLFEESGLITDFTKISINLNPYQLRVKGLTDELSNEELFIALKNMVKHRGISYLDDASDDGNSSVGDYAQIVKENSKQLETKTPGQIQLERYQTYGQLRGDFTVEKDGKKHRLINVFPTSAYRSEALRILQTQQEFNPQITDEFVNRYLEILTGKRKYYHGPGNEKSRTDYGRYRTNGETLDNIFGILIGKCTFYPEEFRAAKASYTAQEFNLLNDLNNLTVPTETKKLSKEQKNQIINYVKNEKAMGPAKLFKYIAKLLSCDVADIKGYRIDKSGKAEIHTFEAYRKMKTLETLDIEQMDRETLDKLAYVLTLNTEREGIQEALEHEFADGSFSQKQVDELVQFRKANSSIFGKGWHNFSVKLMMELIPELYETSEEQMTILKRLGKQKTTSSSNKTKYIDEKLLTEEIYNPVVAKSIRQAIKIVNAAIKEYGDFDNIVIEMARETNEDDEKKAIQKIQKANKDEKDAAMLKAANQYNGKAELPHSVFHGHKQLATKIRLWHQQGERCLYTGKTISIHDLINNPNQFEVDHILPLSITFDDSLANKVLVYATANQEKGQRTPYQALDSMDDAWSFRELKAFVRESKTLSNKKKEYLLTEEDISKFDVRKKFIERNLVDTRYASRVVLNALQEHFRAHKIDTKVSVVRGQFTSQLRRHWGIEKTRDTYHHHAVDALIIAASSQLNLWKKQKNTLVSYSEDQLLDIETGELISDDEYKESVFKAPYQHFVDTLKSKEFEDSILFSYQVDSKFNRKISDATIYATRQAKVGKDKKDETYVLGKIKDIYTQDGYDAFMKIYKKDKSKFLMYRHDPQTFEKVIEPILENYPNKEMNEKGKEVPCNPFLKYKEEHGYIRKYSKKGNDPEIKSLKYYDSKLGNHIDITPKDSNNKVVLQSVSPWRADVYFNKTTGKYEILGLKYADLQFEKGTGTYKISQEKYNDIKKKEGVDSDSEFKFTLYKNDLLLVKDTETKEQQLFRFLSRTMPKQKHYVELKPYDKQKFEGGEALIKVLGNVANSGQCKKGLGKSNISIYKVRTDVLGNQHIIKNEGDKPKLDF

SEQ ID NO: 587 - protein, 1122 aa, Streptococcus thermophilus
  source 1..1122: note = MTCC 5460
MSDLVLGLDIGIGSVGVGILNKVTGEIIHKNSRIFPAAQAENNVERRTNRQGRRLTRRKKHRRVRLNRLFEESGLITDFTKISINLNPYQLRVRGLTDELSNEELFIALKNMVKHRGISYLDDASDDGNSSVGDYAQIVKENSKQLETKTPGQIQLERYQTYGQLRGDFTVEKDGKKHRLINVFPTSAYRSEALRILQTQQEFNSQITDEFINRYLEILTGKRKYYHGPGNEKSRTDYGRYRTSGETLDNIFGILIGKCTFYPEEFRAAKASYTAQEFNLLNDLNNLTVPTETKKLSKEQKNQIINYVKNEKAMGPAKLFKYIAKLLSCDVADIKGYRIDKSGKAEIHTFEAYRKMKTLETLDIEQMDRETLDKLAYVLTLNTEREGIQEALEHEFADGSFSQKQVDELVQFRKASSSIFGKGWHNFSVKLMMELIPELYETSEEQMTILTRLGKQKTTSSSNKTKYIDEKLLTEEIYNPVVAKSVRQAIKIVNAAIKEYGDFDNIVIEMARETNEDDEKKAIQKIQKANKDEKDAAMLKAANQYNGKAELPHSVFHGHKQLATKIRLWHQQGERCLYTGKTISIHDLINNPNQFEVDHILPLSITFDDSLANKVLVYATANQEKGQRTPYQALDSMDDAWSFRELKAFVRESKTLSNKKKEYLLTEEDISKFDVRKKFIERNLVDTRYASRVVLNALQEHFRAHKIDTKVSVVRGQFTSQLRRHWGIEKTRDTYHHHAVDALIIAASSQLNLWKKQKNTLVSYSEDQLLDIETGELISDDEYKESVFKAPYQHFVDTLKSKEFEDSILFSYQVDSKFNRKLSDATIYATRQAKVGKDKKDETYVLGKIKDIYTQDGYDAFMKIYKKDKSKFLMYRHDPQTFEKVIEPILENYPNKEMNEKGKEVPCNPFLKYKEEHGYIRKYSKKGNGPEIKSLKYYDSKLLGNPIDITPENSKNKVVLQSLKPWRADVYFNKTTGKYEILGLKYADLQFEKKTGTYKISQEKYNGIMKEEGVDSDSEFKFTLYKNDLLLVKDTETKEQQLFRFLSRTMPNVKYYVELKPYSKDKFEKNESLIEILGSADKSGRCIKGLGKSNISIYKVRTDVLGNQHIIKNEGDKPKLDF

SEQ ID NO: 588 - protein, 1121 aa, Streptococcus thermophilus
MSDLVLGLDIGIGSVGVGILNKVTGEIIHKNSRIFPAAQAENNLVRRTNRQGRRLTRRKKHRIVRLNRLFEESGLITDFTKISINLNPYQLRVKGLTDELSNEELFIALKNMVKHRGISYLDDASDDGNSSVGDYAQIVKENSKQLETKTPGQIQLERYQTYGQLRGDFTVEKDGKKHRLINVFPTSAYRSEALRILQTQQEFNPQITDEFINRYLEILTGKRKYYHGPGNEKSRTDYGRYRTSGETLDNIFGILIGKCTFYPDEFRAAKASYTAQEFNLLNDLNNLTVPTETKKLSKEQKNQIINYVKNEKAMGPAKLFKYIAKLLSCDVADIKGYRIDKSGKAEIHTFEAYRKMKTLETLDIEQMDRETLDKLAYVLTLNTEREGIQEALEHEFADGSFSQKQVDELVQFRKANSSIFGKGWHNFSVKLMMELIPELYETSEEQMTILTRLGKQKTTSSSNKTKYIDEKLLTEEIYNPVVAKSVRQAIKIVNAAIKEYGDFDNIVIEMARETNEDDEKKAIQKIQKANKDEKDAAMLKAANQYNGKAELPHSVFHGHKQLATKIRLWHQQGERCLYTGKTISIHDLINNSNQFEVDHILPLSITFDDSLANKVLVYATANQEKGQRTPYQALDSMDDAWSFRELKAFVRESKTLSNKKKEYLLTEEDISKFDVRKKFIERNLVDTRYASRVVLNALQEHFRAHKIDTKVSVVRGQFTSQLRRHWGIEKTRDTYHHHAVDALIIAASSQLNLWKKQKNTLVSYSEDQLLDIETGELISDDEYKESVFKAPYQHFVDTLKSKEFEDSILFSYQVDSKFNRKISDATIYATRQAKVGKDKADETYVLGKIKDIYTQDGYDAFMKIYKKDKSKFLMYRHDPQTFEKVIEPILENYPNKQMNEKGKEVPCNPFLKYKEEHGYIRKYSKKGNGPEIKSLKYYDSKLGNHIDITPKDSNNKVVLQSVSPWRADIYFNNTTGKYEILGLKYADLQFEKGTGTYKISQEKYNDIKKKEGVDSDSEFKFTLYKNDLLLVKETETKEQQLFRFLSRTMPKQKHYVELKPYDKQKFEGGEALIKVLGNVANGGQCIKGLGKSNISIYKVRTDVLGNQHIIKNEGDKPKLDF

SEQ ID NO: 589 - protein, 1388 aa, Streptococcus thermophilus
MTKPYSIGLDIGTNSVGWAVITDNYKVPSKKMKVLGNTSKKYIKKNLLGVLLFDSGITAEGRRLKRTARRRYTRRRNRILYLQEIFSTEMATLDDAFFQRLDDSFLVPDDKRDSKYPIFGNLVEEKAYHDEFPTIYHLRKYLADSTKKADLRLVYLALAHMIKYRGHFLIEGEFNSKNNDIQKNFQDFLDTYNAIFESDLSLENSKQLEEIVKDKISKLEKKDRILKLFPGEKNSGIFSEFLKLIVGNQADFRKCFNLDEKASLHFSKESYDEDLETLLGYIGDDYSDVFLKAKKLYDAILLSGFLTVTDNETEAPLSSAMIKRYNEHKEDLALLKEYIRNISLKTYNEVFKDDTKNGYAGYIDGKTNQEDFYVYLKNLLAEFEGADYFLEKIDREDFLRKQRTFDNGSIPYQIHLQEMRAILDKQAKFYPFLAKNKERIEKILTFRIPYYVGPLARGNSDFAWSIRKRNEKITPWNFEDVIDKESSAEAFINRMTSFDLYLPEEKVLPKHSLLYETFNVYNELTKVRFIAESMRDYQFLDSKQKKDIVRLYFKDKRKVTDKDIIEYLHAIYGYDGIELKGIEKQFNSSLSTYHDLLNIINDKEFLDDSSNEAIIEEIIHTLTIFEDREMIKQRLSKFENIFDKSVLKKLSRRHYTGWGKLSAKLINGIRDEKSGNTILDYLIDDGISNRNFMQLIHDDALSFKKKIQKAQIIGDEDKGNIKEVVKSLPGSPAIKKGILQSIKIVDELVKVMGGRKPESIVVEMARENQYTNQGKSNSQQRLKRLEKSLKELGSKILKENIPAKLSKIDNNALQNDRLYLYYLQNGKDMYTGDDLDIDRLSNYDIDHIIPQAFLKDNSIDNKVLVSSASNRGKSDDFPSLEVVKKRKTFWYQLLKSKLISQRKFDNLTKAERGGLLPEDKAGFIQRQLVETRQITKHVARLLDEKFNNKKDENNRAVRTVKIITLKSTLVSQFRKDFELYKVCEINDFHHAHDAYLNAVIASALLKKYPKLEPEFVYGDYPKYNSFRERKSATEKVYFYSNIMNIFKKSISLADGRVIERPLIEVNEETGESVWNKESDLATVRRVLSYPQVNVVKKVEEQNHGLDRGKPKGLFNANLSSKPKPNSNENLVGAKEYLDPKKYGGYAGISNSFAVLVKGTIEKGAKKKITNVLEFQGISILDRINYRKDKLNFLLEKGYKDIELIIELPKYSLFELSDGSRRMLASILSTNNKRGEIHKGNQIFLSQKFVKLLYHAKRISNTINENHRKYVENHKKEFEELFYYILEFNENYVGAKKNGKLLNSAFQSWQNHSIDELCSSFIGPTGSERKGLFELTSRGSAADFEFLGVKIPRYRDYTPSSLLKDATLIHQSVTGLYETRIDLAKLGEG

SEQ ID NO: 590 - protein, 1128 aa, Streptococcus vestibularis
  source 1..1128: note = ATCC 49124
MSDLVLGLDIGIGSVGVGILNKVTGEIIHKNSRIFPAAQAENNVERRTNRQGRRLTRRKKHRRVRLNHLFEESGLITDFTKVSINLNPYQLRVKGLIDELSNEELFIALKNMVKHRGISYLDDASDDGNSSVGDYAQIVKENSKQLETKTPGQIQLERYQKYGQLRGDFTVEEDGKKHRLINVFPTSAYRSEALRILQTQKEFNPQITDEFINRYLEILTGKRKYYHGPGNEKSRTDYGRYTTKKDSENEYITLDNIFGILIGKCTFYPEEYRAAKASYTAQEFNLLNDLNNLTVPTETKKLSEEQKNQIINYVKNEKAMGPAKLFKYIAKLLSCDVADIKGYRIDKSDKAEIHTFEAYRKMKTLETIDFEKMSRDQLDKLAYVLTLNTEREGIQEALDHEFADGNFSQEQIDELVQFRKANSSIFGKGWHNFSVKLMMELIPELYATSEEQMTILTRLGKQKTTSSSNKTKYIDEKLLTEEIYNPVVAKSVRQAIKIVNAAIKEYGDFDNIVIEMARETNEDDEKKAIQKIQKANKDEKDAAMLKAANQYNGRAELPHSVFHGHKQLATKIRLWHQQGERCLYTGKTISIHDLINNPNQFEIDHILPLSITFDDSLANKVLVYATANQEKGQRTPYQALDSMDDAWSFRELKAFVRESKSLSNKKKEYLLTEEDISRFDVRKKFIERNLVDTRYASRVVLNALQEHFRAHKTDTKVSVVRGQFTSQLRRHWGIEKTRDTYHHHAVDALIIAASSQLNLWKKQKNTLVNYSENQLLDIETGELISDDEYKESVFKAPYQHFVDTLKSKEFEDSILFSYQVDSKFNRKISDATIYATRQAKVGKDKKDETYVLGKIKDIYSQTGYDAFIKIYQKDKSKFLMYRHDPQTFEKVIEPILENYPNKEMNEKGKEVPCNPFLKYKEEHGDYIRKYSKKGNGPEIKSLKYYDSKLGNHIDITPKDSNNKVVLQSVSPWRADVYFNKTTGKYEILGLKYADLQFEKGTGTYKISQEKYNVIKKKEGVDSDSEFKFTLYKNDLLLIKDTETKEQQLFRFLSRTKPNVKHYVELKPYDKQKFEGNESLINVLGAVAKGGQCQKGINKPNISIYKVRTDVLGNQHIIKNEGDKPKLDF

SEQ ID NO: 591 - protein, 1084 aa, Subdoligranulum sp.
  source 1..1084: note = 4_3_54A2FAA
MKNTLYGIGLDIGVASVGWAVVGLNGTGEPVGLHRLGVRIFDKAEQPKTGESLAAPRRMARGMRRRLRRKALRRADVYALLERSGLSTREELAQMFEAGGLEDIYALRTRALDEPVGKAEFSRILLHLAQRRGFKSNRRTASDGEDGRLLAAVNENRRRMAQGGWRTVGEMLYRHEAFALHKRNKADDYLSTVGRDMVAEEASILFERQRAMGCSWAAPELQAEYLSILLRQRSFDEGPGGNSPYGGNQVEKMVGRCTFEPDEPRAAKAAYSFEYFSLLQKLNHIRLAENGETRPLTQPQRQQLLSLAHKTPDISLARIRKELALPETVQFNGVRCRANETLEESEKKEKFACLPAYHKMRKALDGVVKGRISSLSISQRDAAATALSLYKNEDTLRAKLTEAGFQAPEIDALAGLTGFSKFGHLSLKACRKLIPHLEQGLTYDQACTAAGYDFKGHGAGERAFTLPAAAPEMEQITSPVVRRAVAQTIKVVNGIIREMDASPAWVRIELARELSKTFGERQEMDRSMRENAAQNERLMQELRDTFHLLSPTGQDLVKYRLWKEQDGVCAYSLRRLDVERLFEPGYVDVDHIVPYSLSFDDRRSNKVLVLSSENRQKGNRLPLQYLQGKRREDFIVWTNSSVHDYRKRQNLLREKLSGDEAEGFRQRNLQDTQHMARFLYNYISDHLAFAQSEALGKKRVFAVSGAVTSHLRKRWGLSKVRADGDLHHALDAAVVACTTDGMIRRISGYYGHIEGEYLQDADGAGSQHARTKERFPAPWPRFRDELIVRLSEQPAEPLLDINPEFYCEYGTEHIRPVFVSRMPRRKVTGPGHKETIKGAAAADEGLLTVRKALTELKLDKDGEIKDYYMPSSDTLLYEALKAQLRRFGGDGKKAFAEPFYKPKADGTPGPLVRKVKTTEKATLTVPVHGGAASNDTMVRVDVFLVPGDGYYWVPVYTADTLKPELPNRAVVQGKPYSEWKEMREEDFIFSLYPNDLVYVEHKSGLKFTLQNADSTLEKTRTQTSAFAYFVSGSISTASITIRTHDNAYGIPSLGVKTLKTFHKYQVDVLGNVFPVHKETRQKFR

SEQ ID NO: 592 - protein, 1422 aa, Sutterella wadsworthensis
  source 1..1422: note = 3_1_45B
MTQSERRFSCSIGIDMGAKYTGVFYALFDREELPTNLNSKAMTLVMPETGPRYVQAQRTAVRHRLRGQKRYTLARKLAFLVVDDMIKKQEKRLTDEEWKRGREALSGLLKRRGYSRPNADGEDLTPLENVRADVFAAHPAFSTYFSEVRSLAEQWEEFTANISNVEKFLGDPNIPADKEFIEFAVAEGLIDKTEKKAYQSALSTLRANANVLTGLRQMGHKPRSEYFKAIEADLKKDSRLAKINEAFGGAERLARLLGNLSNLQLRAERWYFNAPDIMKDRGWEPDRFKKTLVRAFKFFHPAKDQNKQHLELIKQIENSEDIIETLCTLDPNRTIPPYEDQNNRRPPLDQTLLLSPEKLTRQYGEIWKTWSARLTSAEPTLAPAAEILERSTDRKSRVAVNGHEPLPTLAYQLSYALQRAFDRSKALDPYALRALAAGSKSNKLTSARTALENCIGGQNVKTFLDCARRYYREADDAKVGLWFDNADGLLERSDLHPPMKKKILPLLVANILQTDETTGQKFLDEIWRKQIKGRETVASRCARIETVRKSFGGGFNIAYNTAQYREVNKLPRNAQDKELLTIRDRVAETADFIAANLGLSDEQKRKFANPFSLAQFYTLIETEVSGFSATTLAVHLENAWRMTIKDAVINGETVRAAQCSRLPAETARPFDGLVRRLVDRQAWEIAKRVSTDIQSKVDFSNGIVDVSIFVEENKFEFSASVADLKKNKRVKDKMLSEAEKLETRWLIKNERIKKASRGTCPYTGDRLAEGGEIDHILPRSLIKDARGIVFNAEPNLIYASSRGNQLKKNQRYSLSDLKANYRNEIFKTSNIAAITAEIEDVVTKLQQTHRLKFFDLLNEHEQDCVRHALFLDDGSEARDAVLELLATQRRTRVNGTQIWMIKNLANKIREELQNWCKTTNNRLHFQAAATNVSDAKNLRLKLAQNQPDFEKPDIQPIASHSIDALCSFAVGSADAERDQNGFDYLDGKTVLGLYPQSCEVIHLQAKPQEEKSHFDSVAIFKEGIYAEQFLPIFTLNEKIWIGYETLNAKGERCGAIEVSGKQPKELLEMLAPFFNKPVGDLSAHATYRILKKPAYEFLAKAALQPLSAEEKRLAALLDALRYCTSRKSLMSLFMAANGKSLKKREDVLKPKLFQLKVELKGEKSFKLNGSLTLPVKQDWLRICDSPELADAFGKPCSADELTSKLARIWKRPVMRDLAHAPVRREFSLPAIDNPSGGFRIRRTNLFGNELYQVHAINAKKYRGFASAGSNVDWSKGILFNELQHENLTECGGRFITSADVTPMSEWRKVVAEDNLSIWIAPGTEGRRYVRVETTFIQASHWFEQSVENWAITSPLSLPASFKVDKPAEFQKAVGTELSELLGQPRSEIFIENVGNAKHIRFWYIVVSSNKKMNESYNNVSKS

SEQ ID NO: 593 - protein, 1049 aa, Tistrella mobilis
MINERLTFGIDLGIGSCGWAVLRHADAAGEPGVIEGLGSWCFDVPETSKERIPTNQVRRSNRLLRRVIRRRRNRMAEIRRLFHAQGLLPSADEDALKRPRLDPWELRARGLDQCLSAEEFAVALGHIARHRGFRSSAKRKAANTSGEDSKMLSALLVTRERTARYRTVGEMFARDPEYSARRRNRDGIFDRTVARDDLIHEVGKLFEAQRARGSAFASPDLEADFNAIAFRQAEMQDSERLVGNCPFERDEKRAARWAPSFERFRLLTRLINLRIATAEGERRFTPEDLARVSAELGATAKLPVSRVRALIGLLPDERFTTIRVEDEDRDIVARTGEAAPGTWRLRKTLGEALWAEMQARPDQLDAIAHVLSFFEATAKIRSELDRLGLPAAVIEALDRGLEDGAFAKFKGAGHISAKACRNLLPHLQQGHRYDQACRLAGYDHAASTLSHTAQVVSKAGFNALVTELGESIANPIARKALTEGLKQIRAMCARWGLPGAIHIELAREVGNSIEKRRELESQRETTTKRRQTERDEIRGLLALEDVDDDTLLRYRLWKEQGGKCLYTGKDIHVRQLIATDNSVQVDHILPWSRFGDDSFNNKTLCLASANQRKRGQTPWEWFSLTGTPEAWEVFASRVETSKDLRGFKKRNLLLKNADEVAQRFRSRNLNDTRYAARLLAEAAKLFYPAGDRQEKDGRRRVLTRPGPLTAALRHAWGLESLKKADGKRVSDDRHHALDALAVAAISEREVQRLTRSFQEWEQQGLARPLRHVAPPWPGFRGDVLAAYAQAFVARPERRRARGKGHDASIRQVVGEGPEAQVFERRGLADLKEADLDRVKDPERNQAIIEAVRAWILAGRPADAPPRSPRGDVIVKLRTAPAKKIKPAVPVRGGTADRGDMVRIDVFTRPNRKGRDEWYLVPIYPHQVMNRKAWPHPPMRSVVAYKDEAGWTEIGAEHSFRFSLYPRSYVQLVKSNGDVIEGYLVSMDRSTGAFRVFVHNNPAEMAKGIGAKTLLNLRKFNVDRFGVRTEVKSEVRTWHGEVCTSPVPPD

SEQ ID NO: 594 - protein, 1395 aa, Treponema denticola
  source 1..1395: note = AL-2
MKKEIKDYFLGLDVGTGSVGWAVTDTDYKLLKANRKDLWGMRCFETAETAEVRRLHRGARRRIERRKKRIKLLQELFSQEIAKIDEGFFQRMKESPFYAEDKTILQENALFNDKDFTDKTYHKAYPTINHLIKAWIENKVKPDPRLLYLACHNIIKKRGHFLFEGDFDSENQFDTSIQALFEYLREDMEVDIDADSQKVKEILKDSSLKNSEKQSRLNKILGLKPSDKQKKAITNLISGNKINFADLYDNPDLKDAEKNSISFSKDDFDALSDDLASILGDSFELLLKAKAVYNCSVLSKVIGDEQYLSFAKVKIYEKHKTDLTKLKAVIKKHFPNNYKKVFGYNQDNESKNNYSGYVGVCKTKNKKLVINNSVNQEDFYKFLKPILSAKSEIKEVNDILAEIETGNFLPKQISKSNAEIPYQLRKMELEKILSNAEKHFSFLKQKDEKGLSHSEKIIMLLTFKIPYYIGPINDNHKKSFPDRCWVVKKEKSPSGKTTPWNFFDHIDKEKTAEEFITSRTNFCTYLIGESVLPKNSLLYSEYTVLNEINNLQIIIDGKNICDTKLKQKIYEDLFKKYKKITQKQISTFIKHEGICNKTDEVIILGIDKECTSSLKSYIELKNIFGKQVDEISTKNMLEEIIRWATIYDEGEGKTILKTKIKAEYGKYCSDEQIKKILNLKFSGWGRLSRKFLETVTSEMPGFSEPVNIITAMRETQNNLMELLSSEFKFTENIKKINSGFEDAEKQFSYDGLVKPLFLSPSVKKMLWQTLKLVKEISHITQAPPKKIFIEMAKGAELEPARTKTRLKILQDLYSSCKNDADAFSSEIQYLSGKIENEDNLRLRSDKLYLYYTQLGKCMYCGKPIEIGHVFDTSNYDIDHIYPQSKIKDDSISNRVLVCSSCNKNKEDKYPLKSEIQSKQRGFWNFLQRNNFISLEKLNRLTRTTPISDDETAKFIARQLVETRQATKVAAKVLEKMFPETKIVYSKAETVSMFRNKFDIIKCREINDFHHAHDAYLNIVVGNVYNTKFTNNPWNFIKEKRDNPKIADTYNYYKVFDYDVKRNNITAWEKGKTIITVKDMLKRNTPIYTRQAACKKGGLFDQTIMKKGLGQHPLKKEGPFSNISKYGGYNKVSAAYYTLIEYEEKGNKIRSLETIPLYLVKDIQKDQDVLKSYLTDLLGKKEFKILVPKIKINSLLKINGFPCHITGKTNDSFLLRPAVQFCCSNDEVLYFKKIIRFSEIRSQREKIGKTISPYEDLSFRSYIKENLCKKTKNDEIGEKEFYDLLQKKNLEIYDMLLTKHKDTIYKKRPNSATIDILVKGKEKFKSLIIENQFEVILEILKLFSATRNVSELQHIGGSKYSGVAKIGNKISSLDNCILIYQSITGIFEKRIDLLKV

SEQ ID NO: 595 - protein, 1395 aa, Treponema denticola
  source 1..1395: note = ASLM
MKKEIKDYFLGLDVGTGSVGWAVTDTDYKLLKANRKDLWGMRCFETAETAEVRRLHRGARRRIERRKKRIKLLQELFSQEIAKIDEGFFQRMKESPLYAEDKTILQENTLFNDKDFTDKTYHKAYPTINHLIKAWIENKVKPDPRLLYLACHNIIKKRGHFLFEGDFDSENQFDTSIQALFEYLREDMEVDIDADSQKVKEILKDSSLKNSEKQSRLNKMLGLKPSDKQKKAITNLISGNKINFADLYDNPDLKDAEKNSISFSKDDFDALSDDLASILGDSFELLLKAKAVYNCSVLSKVIGDEQYLSFAKVKIYEKHKTDLTKLKNVIKKHFPKDYKKVFGYNKNEKNNNNYSGYVGVCKTKSKKLIINNSVNQEDFYKFLKTILSAKSEIKEVNDILTEIETGTFLPKQISKSNAEIPYQLRKMELEKILSNAEKHFSFLKQKDEKGLSHSEKIIMLLTFKIPYYIGPINDNHKKSFPDRCWVVKKEKSPSGKTTPWNFFDHIDKEKTAEEFITSRTNFCTYLIGESVLPKNSLLYSEYTVLNEINNLQIIIDGKNICDTKLKQKIYEELFKKYKKITQKQISTFIKHEGICNKTDEVIILGIDKECTSSLKSYIELKNIFGKQVDEISTKNMLEEIIRWATIYDEGEGKTILKTKIKAEYGKYCSDEQIKKILNLKFSGWGRLSRKFLETVTSEMPGFSEPVNIITAMRETQNNLMELLSSEFKFTENIKKINSGFEDVEKQFSYDGLVKPLFLSPSVKKMLWQTLKLVKEISHITQAPPKKIFIEMAKGAELDPVRTKTRLKILQDLYNNCKNDADAFSSEIKDLSGKIENEDNLRLRSDKLYLYYTQLGKCMYCGKPIEIGHVFDTSNYDIDHIYPQSKIKDDSISNRVLVCSSCNKNKEDKYPLKAEIQSKQRGFWNFLQRNNFISLEKFNRLTRATPISDDETAKFIARQLVETRQATKVAARVLEKMFPETKIVYSKAETVSMFRNKFDIVKCREINDFHHAHDAYLNIVVGNVYNTKFTNNLWNFIKEKRDNPKIADTYNYYKVFDYDVKRNNITAWEKGKTIITVKDMLKRNTPIYTRQAACKKGGLFDQTIMKKGLGQHPLKKEGPFSNISKYGGYNKVSAAYYTLIEYEEKGNKIRSLETIPLYLVKDIQKDQDVLKSYLTDLLGKKEFKILVPKIKINSLLKINGFPCHITGKTNDSFLLRPAVQFCCSNDEVLYFKKIIRFSEIRSQREKIGKTISPYEDLSFRSYIKENLCKKTKNDEIGEKEFYDLLQKKNLEIYDMLLTKHKDTIYKKRPNSATIDILVKGKEKFKSLIIENQFEVILEILKLFSATRNVSDLQHIGGSKYSGVAKIGNKISSLDNCILIYQSITGIFEKRIDLLKV

SEQ ID NO: 596 - protein, 1395 aa, Treponema denticola
  source 1..1395: note = ATCC 35405
MKKEIKDYFLGLDVGTGSVGWAVTDTDYKLLKANRKDLWGMRCFETAETAEVRRLHRGARRRIERRKKRIKLLQELFSQEIAKTDEGFFQRMKESPFYAEDKTILQENTLFNDKDFADKTYHKAYPTINHLIKAWIENKVKPDPRLLYLACHNIIKKRGHFLFEGDFDSENQFDTSIQALFEYLREDMEVDIDADSQKVKEILKDSSLKNSEKQSRLNKILGLKPSDKQKKAITNLISGNKINFADLYDNPDLKDAEKNSISFSKDDFDALSDDLASILGDSFELLLKAKAVYNCSVLSKVIGDEQYLSFAKVKIYEKHKTDLTKLKNVIKKHFPKDYKKVFGYNKNEKNNNNYSGYVGVCKTKSKKLIINNSVNQEDFYKFLKTILSAKSEIKEVNDILTEIETGTFLPKQISKSNAEIPYQLRKMELEKILSNAEKHFSFLKQKDEKGLSHSEKIIMLLTFKIPYYIGPINDNHKKFFPDRCWVVKKEKSPSGKTTPWNFFDHIDKEKTAEAFITSRTNFCTYLVGESVLPKSSLLYSEYTVLNEINNLQIIIDGKNICDIKLKQKIYEDLFKKYKKITQKQISTFIKHEGICNKTDEVIILGIDKECTSSLKSYIELKNIFGKQVDEISTKNMLEEIIRWATIYDEGEGKTILKTKIKAEYGKYCSDEQIKKILNLKFSGWGRLSRKFLETVTSEMPGFSEPVNIITAMRETQNNLMELLSSEFTFTENIKKINSGFEDAEKQFSYDGLVKPLFLSPSVKKMLWQTLKLVKEISHITQAPPKKIFIEMAKGAELEPARTKTRLKILQDLYNNCKNDADAFSSEIKDLSGKIENEDNLRLRSDKLYLYYTQLGKCMYCGKPIEIGHVFDTSNYDIDHIYPQSKIKDDSISNRVLVCSSCNKNKEDKYPLKSEIQSKQRGFWNFLQRNNFISLEKLNRLTRATPISDDETAKFIARQLVETRQATKVAAKVLEKMFPETKIVYSKAETVSMFRNKFDIVKCREINDFHHAHDAYLNIVVGNVYNTKFTNNPWNFIKEKRDNPKIADTYNYYKVFDYDVKRNNITAWEKGKTIITVKDMLKRNTPIYTRQAACKKGELFNQTIMKKGLGQHPLKKEGPFSNISKYGGYNKVSAAYYTLIEYEEKGNKIRSLETIPLYLVKDIQKDQDVLKSYLTDLLGKKEFKILVPKIKINSLLKINGFPCHITGKTNDSFLLRPAVQFCCSNNEVLYFKKIIRFSEIRSQREKIGKTISPYEDLSFRSYIKENLWKKTKNDEIGEKEFYDLLQKKNLEIYDMLLTKHKDTIYKKRPNSATIDILVKGKEKFKSLIIENQFEVILEILKLFSATRNVSDLQHIGGSKYSGVAKIGNKISSLDNCILIYQSITGIFEKRIDLLKV

SEQ ID NO: 597 - protein, 1395 aa, Treponema denticola
  source 1..1395: note = H1-T
MKKEIKDYFLGLDVGTGSVGWAVTDTDYKLLKANRKDLWGMRCFETAETAEVRRLHRGARRRIERRKKRIKLLQELFSQEIAKIDEGFFQRMKESPFYAEDKTILQENALFNDKDFTDKTYHKAYPTINHLIKAWIENKVKPDPRLLYLACHNIIKKRGHFLFEGDFDSENQFDTSIQALFEYLREDMEVDIDADSQKVKEILKDSSLKNSEKQSRLNKILGLKPSDKQKKAITNLISGNKINFADLYDNPDLKDAEKNSISFSKDDFDALSDDLASILGDSFELLLKAKAVYNCSVLSKVIGDEQYLSFAKVKIYEKHKTDLTKLKAVIKKHFPNNYKKVFGYNQDNESKNNYSGYVGVCKTKNKKLVINNSVNQEDFYKFLKPILSAKSEIKEVNDILAEIETGNFLPKQISKSNAEIPYQLRKMELEKILSNAEKHFSFLKQKDEKGLSHSEKIIMLLTFKIPYYIGPINDNHKKSFPDRCWVVKKEKSPSGKTTPWNFFDHIDKEKTAEEFITSRTNFCTYLIGESVLPKNSLLYSEYTVLNEINNLQIIIDGKNICDTKLKQKIYEDLFKKYKKITQKQISTFIKHEGICNKTDEVIILGIDKECTSSLKSYIELKNIFGKQVDEISTKNMLEEIIRWATIYDEGEGKTILKTKIKAEYGKYCSDEQIKKILNLKFSGWGRLSRKFLETVTSEMPGFSEPVNIITAMRETQNNLMELLSSEFKFTENIKKINSGFEDAEKQFSYDGLVKPLFLSPSVKKMLWQTLKLVKEISHITQAPPKKIFIEMAKGAELEPARTKTRLKILQDLYSSCKNDADAFSSEIQYLSGKIENEDNLRLRSDKLYLYYTQLGKCMYCGKPIEIGHVFDTSNYDIDHIYPQSKIKDDSISNRVLVCSSCNKNKEDKYPLKSEIQSKQRGFWNFLQRNNFISLEKLNRLTRTTPISDDETAKFIARQLVETRQATKVAAKVLEKMFPETKIVYSKAETVSMFRNKFDIIKCREINDFHHAHDAYLNIVVGNVYNTKFTNNPWNFIKEKRDNPKIADTYNYYKVFDYDVKRNNITAWEKGKTIITVKDMLKRNTPIYTRQAACKKGELFNQTIMKKGLGQHPLKKEGPFSNISKYGGYNKVSAAYYTLIEYEEKVNKIRSLETIPLYLVKDIQKDQDVLKSYLTDLLGKKEIKILVPKIKINSLLKINGFPCHITGKTGDSFVLRPAVQFCCSNDEVLYFKKIIRFNEIRSQREKMGKTISPYEDLSFRSYIKENLCKKTKADEIGEKEFYDLLQKKNLEIYDMLLTKHKDTIYNKRPNSTTLGMLTKGRYEFINLKPKDQIIVMLEILKLFCTTREAIDLGLIKGKPAAGVATLGKKISNLDNCILIYQSITGIFEKRIDLLKV

SEQ ID NO: 598 - protein, 1395 aa, Treponema denticola
  source 1..1395: note = H-22
MKKEIKDYFLGLDVGTGSVGWAVTDTDYKLLKANRKDLWGMRCFETAETAEVRRLHRGARRRIERRKKRIKLLQELFSQEIAKIDEGFFQRMKESPFYAEDKTILQENTLFNDKDFTDKTYHKAYPTINHLIKAWIENKVKPDPRLLYLACHNIIKKRGHFLFEGDFDSENQFDTSIQALFEYLREDMEVDIDADSQKVKEILKDSSLKNSEKQSRLNKILGLKPSDKQKKAITNLISGNKINFADLYDNPDLKDAEKNSISFSKDDFDALSDDLASILGDSFELLLKAKAVYNCSVLSKVIGDEQYLSFAKVKIYEKHKTDLTKLKNVIKKHFPKDYKKVFGYNKNEKNNNNYSGYVGVCKTKSKKLIINNSVNQEDFYKFLKTILSAKSEIKEVNDILTEIETGTFLPKQISKSNAEIPYQLRKMELEKILSNAEKHFSFLKQKDEKGLSHSEKIIMLLTFKIPYYIGPINDNHKKSFPDRCWVIKKEKSPSGKTTPWNFFDHIDKDKTAEAFITSRTNFCTYLVGESVLPKSSLLYSEYTVLNEINNLQIIIDGKNICDIKLKQKIYEELFKKYKKITQKQISTFIKHEGICNKTDEVIILGIDKECTSSLKSYIELKNIFGKQVDEISTKNMLEEIIRWATIYDEGEGKTILKTKIKAEYGKYCSDEQIKKILNLKFSGWGRLSRKFLETVTSEMPGFSEPVNIITAMRETQNNLMELLSSEFKFTENIKKINSGFEDAEKQFSYNGLVKPLFLSPSVKKMLWQTLKLVKEISHITQAPPKKIFIEMAKGAELEPARTKTRLKILQDLYNNCKNDADAFSSEIKDLSGKIENEDNLRLRSDKLYLYYTQLGKCMYCGKPIEIGHVFDTSNYDIDHIYPQSKIKDDSISNRVLVCSSCNKNKEDKYPLKSEIQSKQRGFWNFLQRNNFISLEKLNRLTRTTPISDDETAKFIARQLVETRQATKVAAKVLEKMFPETKIVYSKAETVSMFRNKFDIIKCREINDFHHAHDAYLNIVVGNVYNTKFTNNPWNFIKEKRDNPKIADTYNYYKVFDYDVKRNNITAWEKGKTIITVKDMLKRNTPIYTRQAACKKGGLFDQTIMKKGLGQHPLKKEGAFSNISKYGGYNKVSAAYYTLIEYEEKGNKIRSLETIPLYLVKDIQKDQDVLKSYLTDLLGKKEIKILVPKIKINSLLKINGFPCHITGKTGDSFVLRPAVQFCCSNDEVLYFKKIIRFNEIRSQREKMGKTISPYEDLSFRSYIKENLCKKTKADEIGEKEFYDLLQKKNLEIYDMLLTKHKDTIYNKRPNSTTLGMLTKGRYEFINLKPKDQIIVMLEILKLFCTTREAIDLGLIKGKPAAGVATLGKKISNPDNCILIYQSITGIFEKRIDLLKV

SEQ ID NO: 599 - protein, 1395 aa, Treponema denticola
  source 1..1395: note = OTK
MKKEIKDYFLGLDVGTGSVGWAVTDTDYKLLKANRKDLWGMRCFETAETAEVRRLHRGARRRIERRKKRIKLLQELFSQEIAKIDEGFFQRMKESPLYAEDKTILQENTLFNDKDFTDKTYHKAYPTINHLIKAWIENKVKPDPRLLYLACHNIIKKRGHFLFEGDFDSENQFDTSIQALFEYLREDMELDIDADSQKVKEILKDSSLKNSEKQSRLNKMLGLKPSDKQKKAITNLISGNKINFADLYDNPDLKDAEKNSISFSKDDFDALSDDLASILGDSFELLLKAKAVYNCSVLSKVIGDEQYLSFAKVKIYEKHKTDLTKLKNVIKKHFPKDYKKVFGYNKNEKNNNNYSAYVGVCKITHKKLVIKNSASQEDFYKFLKTILSAKSEIKEVNDILTEIETGTFLPKQISKSNAEIPYQLRKMELEKILSNAEKHFSFLKQKDEKGLSHSEKIIMLLTFKIPYYIGPINDNHKKSFPDRCWVVKKEKSPSGKTTPWNFFDHIDKEKTAEEFITSRTNFCTYLIGESVLPKSSLLYSEYTVLNEINNLQIIIDGKNICDIKLKQKIYEELFKKYKKITQKQISTFIKHEGICNKTDEVIILGIDKECTSSLKSYIELKNIFGKQVDEISTKNMLEEIIRWATIYDEGEGKTILKTKIKAEYGKYCSDEQIKKILNLKFSGWGRLSRKFLETVTSEMPGFSEPVNIITAMRETQNNLMELLSSEFKFTENIKKINSGFEDAEKQFSYNGLVKPLFLSPSVKKMLWQTLKLVKEISHITQAPPKKIFIEMAKGAELEPARTKTRLKILQDLYSSCKNDADAFSSEIQYLSGKIENEDNLRLRSDKLYLYYTQLGKCMYCGKPIEIGHVFDTSNYDIDHIYPQSKIKDDSISNRVLVCSSCNKNKEDKYPLKAEIQSKQRGFWNFLQRNNFISLEKLNRLTRTSPISDDETAKFIARQLVETRQATKVAAKVLEKMFPETKIVYSKAETVSMFRNKFDIIKCREINDFHHAHDAYLNIVVGNVYNTKFTNNPWNFIKEKRDNPKIADTYNYYKVFDYDVKRNNITAWEKGKTIITVKDMLKRNTPIYTRQAACKKGELFNQTIMKKGLGQHPLKKEGPLSNISKYGGYNKVSAAYYTLIEYEEKGSKIRSLETIPLYLVKDIQKNKDGLKSYLTDQIGKKEIKILIPKIKINSLLKINGFPCHITGKMGEAFVLRPAVQFCCSNDEALYFKKIIRFNEIRKQREKMGKTISPYEDLSFRSYIKDNLCKKTKADEIEEKEFYDLLQKKNLEIYDMLLTKHKDTIYKKRPNSATIDILVKGKEKFKSLIIENQFEVILEILKLFSATRNVSDLQHIGGSKNAGNARVGNKISSLDNCILIYQSITGIFEKRIDLLKI

SEQ ID NO: 600 - protein, 1395 aa, Treponema denticola
  source 1..1395: note = SP37
MKKEIKDYFLGLDVGTGSVGWAVTDTDYKLLKANRKDLWGMRCFETAETAEVRRLHRGARRRIERRKKRIKLLQELFSQEIAKTDEGFFQRMKESPFYAEDKTILQENALFNDRDFTDKTYHKAYPTINHLIKAWIENKVKPDPRLLYLACHNIIKKRGHFLFEGDFDSENQFDTSIQALFEYLREDMEVDIDADSQKVKEILKDSSLKNSEKQSRLNKMLGLKPSDKQKKAITNLISGNKINFADLYDNPDLKDAEKNSISFSKDDFDALSDDLASILGDSFELLLKAKAVYNCSVLSKVIGDEQYLSFAKVKIYEKHKTDLTKLKNVIKKHFPNDYKKVFGYNKNEKNNNNYSAYVGVCKTKSKKLVINNTVNQEDFYKFLKPILLAKSEIKEVNDILTEIETGTFLPKQISKSNAEIPYQLRKMELEKILSNAEKHFSFLKQKDEKGLSHSEKIIMLLTFKIPYYIGPINDNHKKSFPDRCWVIKKEKSPSGKTTPWNFFDHIDKDKTAEAFITSRTNFCTYLVGESVLPKNSLLYSEYTVLNEINNLQIIIDGKNICDIKLKQKIYEELFKKYKKITQKQISTFIKHEGICNKTDEVIILGIDKECTSSLKSYIELKNIFGKQVDEISTKNMLEEIIRWATIYDEGEGKTILKTKIKAEYGKYCSDEQIKKILNLKFSGWGRLSRKFLETVTSEMPGFSEPVNIITAMRETQNNLMELLSSEFKFTENIKKINSGFEDVEKQFSYDSLVKPLFLSPSVKKMLWQTLKLVKEISHITQAPPKKIFIEMAKGAELDPVRTKTRLKILQDLYNNCKNDADAFSSEIKDLSGKIENEDNLRLRSDKLYLYYTQLGKCMYCGKPIEIGHVFDTSNYDIDHIYPQSKIKDDSISNRVLVCSSCNKNKEDKYPLKAEIQSKQRGFWNFLQRNNFISLEKLNRLTRTSPISDDETAKFIARQLVETRQATKVAAKVLEKMFPETKIVYSKAETVSMFRNKFDIIKCREINDFHHAHDAYLNIVVGNVYNTKFTNNPWNFIKEKRDNPKIADTYNYYKVFDYDVKRNNITAWEKGKTIITVKDMLKRNTPIYTRQAACKKGELFNQTIMKKGLGQHPLKKEGPLSNISKYGGYNKVSAAYYTLIEYEEKGSKIRSLETIPLYLVKDIQKNKDGLKSYLTDQIGKKEIKILIPKIKINSLLKINGFPCHITGKMGEAFVLRPAVQFCCSNDEALYFKKIIRFNEIRKQREKMGKTISPYEDLSFRSYIKDNLCKKTKADEIEEKEFYDLLQKKNLEIYDMLLTKHKDTIYKKRPNSATIDILVKGKEKFKSLIIENQFEVILEILKLFSATRNVSDLQHIGGSKNAGNARVGNKISSLDNCILIYQSITGIFEKRIDLLKI

SEQ ID NO: 601 - protein, 1062 aa, Treponema sp.
  source 1..1062: note = JC4
MIMKLEKWRLGLDLGTNSIGWSVFSLDKDNSVQDLIDMGVRIFSDGRDPKTKEPLAVARRTARSQRKLIYRRKLRRKQVFKFLQEQGLFPKTKEECMTLKSLNPYELRIKALDEKLEPYELGRALFNLAVRRGFKSNRKDGSREEVSEKKSPDEIKTQADMQTHLEKAIKENGCRTITEFLYKNQGENGGIRFAPGRMTYYPTRKMYEEEFNLIRSKQEKYYPQVDWDDIYKAIFYQRPLKPQQRGYCIYENDKERTFKAMPCSQKLRILQDIGNLAYYEGGSKKRVELNDNQDKVLYELLNSKDKVTFDQMRKALCLADSNSFNLEENRDFLIGNPTAVKMRSKNRFGKLWDEIPLEEQDLIIETIITADEDDAVYEVIKKYDLTQEQRDFIVKNTILQSGTSMLCKEVSEKLVKRLEEIADLKYHEAVESLGYKFADQTVEKYDLLPYYGKVLPGSTMEIDLSAPETNPEKHYGKISNPTVHVALNQTRVVVNALIKEYGKPSQIAIELSRDLKNNVEKKAEIARKQNQRAKENIAINDTISALYHTAFPGKSFYPNRNDRMKYRLWSELGLGNKCIYCGKGISGAELFTKEIEIEHILPFSRTLLDAESNLTVAHSSCNAFKAERSPFEAFGTNPSGYSWQEIIQRANQLKNTSKKNKFSPNAMDSFEKDSSFIARQLSDNQYIAKAALRYLKCLVENPSDVWTTNGSMTKLLRDKWEMDSILCRKFTEKEVALLGLKPEQIGNYKKNRFDHRHHAIDAVVIGLTDRSMVQKLATKNSHKGNRIEIPEFPILRSDLIEKVKNIVVSFKPDHGAEGKLSKETLLGKIKLHGKETFVCRENIVSLSEKNLDDIVDEKIKSKVKDYVAKHKGQKIEAVLSDFSKENGIKKVRCVNRVQTPIEITSGKISRYLSPEDYFAAVIWEIPGEKKTFKAQYIRRNEVEKNSKGLNVVKPAVLENGKPHPAAKQVCLLHKDDYLEFSDKGKMYFCRIAGYAATNNKLDIRPVYAVSYCADWINSTNETMLTGYWKPTPTQNWVSVNVLFDKQKARLVTVSPIGRVFRK

SEQ ID NO: 602 - protein, 1011 aa, unidentified
  source 1..1011: note = uncultured delta proteobacterium HF0070_07E19
MSSKAIDSLEQLDLFKPQEYTLGLDLGIKSIGWAILSGERIANAGVYLFETAEELNSTGNKLISKAAERGRKRRIRRMLDRKARRGRHIRYLLEREGLPTDELEEVVVHQSNRTLWDVRAEAVERKLTKQELAAVLFHLVRHRGYFPNTKKLPPDDESDSADEEQGKINRATSRLREELKASDCKTIGQFLAQNRDRQRNREGDYSNLMARKLVFEEALQILAFQRKQGHELSKDFEKTYLDVLMGQRSGRSPKLGNCSLIPSELRAPSSAPSTEWFKFLQNLGNLQISNAYREEWSIDAPRRAQIIDACSQRSTSSYWQIRRDFQIPDEYRFNLVNYERRDPDVDLQEYLQQQERKTLANFRNWKQLEKIIGTGHPIQTLDEAARLITLIKDDEKLSDQLADLLPEASDKAITQLCELDFTTAAKISLEAMYRILPHMNQGMGFFDACQQESLPEIGVPPAGDRVPPFDEMYNPVVNRVLSQSRKLINAVIDEYGMPAKIRVELARDLGKGRELRERIKLDQLDKSKQNDQRAEDFRAEFQQAPRGDQSLRYRLWKEQNCTCPYSGRMIPVNSVLSEDTQIDHILPISQSFDNSLSNKVLCFTEENAQKSNRTPFEYLDAADFQRLEAISGNWPEAKRNKLLHKSFGKVAEEWKSRALNDTRYLTSALADHLRHHLPDSKIQTVNGRITGYLRKQWGLEKDRDKHTHHAVDAIVVACTTPAIVQQVTLYHQDIRRYKKLGEKRPTPWPETFRQDVLDVEEEIFITRQPKKVSGGIQTKDTLRKHRSKPDRQRVALTKVKLADLERLVEKDASNRNLYEHLKQCLEESGDQPTKAFKAPFYMPSGPEAKQRPILSKVTLLREKPEPPKQLTELSGGRRYDSMAQGRLDIYRYKPGGKRKDEYRVVLQRMIDLMRGEENVHVFQKGVPYDQGPEIEQNYTFLFSLYFDDLVEFQRSADSEVIRGYYRTFNIANGQLKISTYLEGRQDFDFFGANRLAHFAKVQVNLLGKVIK

SEQ ID NO: 603 - protein, 1032 aa, unidentified
  source 1..1032: note = uncultured Termite group 1 bacterium phylotype Rs-D17
MLYHIANHRGTDSVRSFLEYDDDKIKENTLTAKIAKETKKVIDAKKYRTFGEYLYKGKIEKFQQNIRKKVSNRKTPANKNKEFAVTRDVIIKETEKILASQKQYYTYILTDEYIKKIKDAISYQTEKLIPESGYCPYFKDEKRLPRSHKLNEYRRMYEALNNAKYFDPVLDENTGEILSYQEKEFSREEKKILFDEVLLKGMELTESGAKKLLYHLPDGCEVQLQGRDKTTQKIKGYALVDLEASPFWLRLSQQQQDEFLYDWNSLPLEKLKPKLTNYYSLTESEVDETFQEIKLPSNYASVGKKAMEILLTYIKDGCSYTEALEKAVSEGKLKVDKQTMIYDSLPYYGKILKESTQKLIGKAFSKQFADRNYKEPDTNKNEREFGKIANPVVHQTLNELRKLINEIITVFGKKPLEIGLETTRELKKSKKNREYLSKQQNKNEYARNRIYKEYIEPHLSQIKSRQENPSKYISKFELLEEQNFICPFCSEKITPDDIINSKVDVEHIFPIEESEDITKNNLVIAHNECNADKGKKSPFDAFGDKTSGKYRWNCILHNAQKNLPHKVWRFYQGSLEKFLENKPMSRRFGTDNSYISKIAARYLACLFNDPYHSEIFCIKSSLIAQLRIAWDLNSIMVPLVKNILSEKELEEFKISKNKKIRIDNRHHALDAIVIAYANRGYHNFLNRIHAKEYKINYREKSWLSKILLPPLNRDLEDFKISVKDSIEKANVSIKHDHNTNGSLVKATAYKVYYSGAGEYIITTSKNVEEISFKEKEDPKDTLYRALCKFECRDIDIKDEKLIKKLKYNSTLYKKVQNNLSKAKQELEQDNKKTEEEGKKSQKITEVRIYKKACSLVKGQYIQCGSRLKDKFFAVKEPTEIKTGLGYDTGDNLFLDLYYDKTGKLCGEIIRKVNFNRNKPNYQKEGYTLFERIYQSDILEVDTSEDRISLKNKTGSAPSDRTFIKVNTFTEVNAYFDGKRDKIQIFFGNLLKSSFKNDSFFISSMQKYNVRKVILTSLGIIKYRSQILKNKEV

SEQ ID NO: 604 - protein, 1398 aa, Veillonella atypica
  source 1..1398: note = ACS-134-V-Col7a
METQTSNQLITSHLKDYPKQDYFVGLDIGTNSVGWAVTNTSYELLKFHSHKMWGSRLFEEGESAVTRRGFRSMRRRLERRKLRLKLLEELFADAMAQVDSTFFIRLHESKYHYEDKTTGHSSKHILFIDEDYTDQDYFTEYPTIYHLRKDLMENGTDDIRKLFLAVHHILKYRGNFLYEGATFNSNAFTFEDVLKQALVNITFNCFDTNSAISSISNILMESGKTKSDKAKAIERLVDTYTVFDEVNTPDKPQKEQVKEDKKTLKAFANLVLGLSANLIDLFGSVEDIDDDLKKLQIVGDTYDEKRDELAKVWGDEIHIIDDCKSVYDAIILMSIKEPGLTISQSKVKAFDKHKEDLVILKSLLKLDRNVYNEMFKSDKKGLHNYVHYIKQGRTEETSCSREDFYKYTKKIVEGLADSKDKEYILNEIELQTLLPLQRIKDNGVIPYQLHLEELKVILDKCGPKFPFLHTVSDGFSVTEKLIKMLEFRIPYYVGPLNTHHNIDNGGFSWAVRKQAGRVTPWNFEEKIDREKSAAAFIKNLTNKCTYLFGEDVLPKSSLLYSEFMLLNELNNVRIDGKALAQGVKQHLIDSIFKQDHKKMTKNRIELFLKDNNYITKKHKPEITGLDGEIKNDLTSYRDMVRILGNNFDVSMAEDIITDITIFGESKKMLRQTLRNKFGSQLNDETIKKLSKLRYRDWGRLSKKLLKGIDGCDKAGNGAPKTIIELMRNDSYNLMEILGDKFSFMECIEEENAKLAQGQVVNPHDIIDELALSPAVKRAVWQALRIVDEVAHIKKALPSRIFVEVARTNKSEKKKKDSRQKRLSDLYSAIKKDDVLQSGLQDKEFGALKSGLANYDDAALRSKKLYLYYTQMGRCAYTGNIIDLNQLNTDNYDIDHIYPRSLTKDDSFDNLVLCERTANAKKSDIYPIDNRIQTKQKPFWAFLKHQGLISERKYERLTRIAPLTADDLSGFIARQLVETNQSVKATTTLLRRLYPDIDVVFVKAENVSDFRHNNNFIKVRSLNHHHHAKDAYLNIVVGNVYHEKFTRNFRLFFKKNGANRTYNLAKMFNYDVICTNAQDGKAWDVKTSMNTVKKMMASNDVRVTRRLLEQSGALADATIYKASVAAKAKDGAYIGMKTKYSVFADVTKYGGMTKIKNAYSIIVQYTGKKGEEIKEIVPLPIYLINRNATDIELIDYVKSVIPKAKDISIKYRKLCINQLVKVNGFYYYLGGKTNDKIYIDNAIELVVPHDIATYIKLLDKYDLLRKENKTLKASSITTSIYNINTSTVVSLSNKVGIDVFDYFMSKLRTPLYMKMKGNKVDELSSTGRSKFIKMTLEEQSIYLLEVLNLLTNSKTTFDVKPLGITGSRSTIGVKIHNLDEFKIINESITGLYSNEVTIV

SEQ ID NO: 605 - protein, 1398 aa, Veillonella parvula
  source 1..1398: note = ATCC 17745
METQASNQLISSHLKGYPIKDYFVGLDIGTSSVGWAVTNKAYELLKFRSHKMWGSRLFDEGESAVARRGFRSMRRRLERRKLRLKLLEELFADAMAQVDPTFFMRLRESKYHYEDKTTGHSSKHILFIDKNYNDQDYFKEYPTVYHLRSELMKSGTDDIRKLFLAVHHILKYRGNFLYEGATFDSNASTLDDVIKQALENITFNCFDCNSAISSIGQILMEAGKTKSDKAKAIEHLVDTYIATDTVDTSSKTQKDQVKEDKKRLKAFANLVLGLNASLIDLFGSVEELEEDLKKLQITGDTYDDKRDELAKAWSDEIYIIDDCKSVYDAIILLSIKEPGLTISESKVKAFNKHKDDLAILKSLLKSDRSIYNTMFKVDEKGLHNYVHYIKQGRTEETSCNREDFYKYTKKIVEGLSDSKDKEYILSQIELQILLPLQRIKDNGVIPYQLHLEELKAILAKCGPKFPFLNEVADGFSVAEKLIKMLEFRIPYYVGPLNTHHNVDNGGFAWAVRKASGRVTPWNFDDKIDREKSAAAFIKNLTNKCTYLLGEDVLPKSSLLYSEFMLLNELNNVRIDGKPLEKVVKEHLIEAVFKQDHKKMTKNRIEQFLKDNGYISETHKHEITGLDGEIKNDLASYRDMVRILGDGFDRSMAEEIITDITIFGESKKMLRETLRKKFASCLDDEAIKKLTKLRYRDWGRLSQKLLNGIEGCDKAGDGTPETIIILMRNFSYNLMELLGDKFSFMERIQEINAKLTEGQIVNPHDIIDDLALSPAVKRAVWQALRIVDEVAHIKKALPARIFVEVTRSNKNEKKKKDSRQKRLSDLYAAIKKDDVLLNGLNNEIFGELKSSLAKYDDAALRSKKLYLYYTQMGRCAYTGEIIELSLLNTDNYDIDHIYPRSLTKDDSFDNLVLCKRTANAQKSDAYPISEEIQKTQKPFWTFLKQQGLISERKYERLTRITPLTADDLSGFIARQLVETNQSVKAATTLLRRLYPGVDVVFVKAENVTDFRHDNNFIKVRSLNHHHHAKDAYLNIVVGNVYHERFTRNFRAFFKKNGANRTYNLAKMFNYDVNCTNAKDGKAWDVKTSMDTVKKMMDSNDVRVTKRLLEQTGALADATIYKATVAGKAKDGAYIGMKTKSSVFADVSKYGGMTKIKNAYSIIVQYTGKKGEVIKEIVPLPIYLTNRNTTDQDLINYVASIIPQAKDISIIYGKLCINQLVKVNGFYYYLGGKTNSKFCIDNAIQVIVSNEWIPYLKVLEKFNNMRKDNKDLKANVVSTRALDNKHTIEVRIVEEKNIEFFDYLVSKLKMPIYQKMKGNKAAELSEKGYGLFKKMSLEEQSIHLIELLNLLTNQKTTFEVKPLGITASRSTVGSKISNQDEFKVINESITGLYSNEVTIV

SEQ ID NO: 606 - protein, 1395 aa, Veillonella sp.
  source 1..1395: note = 6_1_27
METQASNQLISSHLKGYPIKDYFVGLDIGTSSVGWAVTNKAYELLKFRSHKMWGSRLFDEGESAVARRGFRSMRRRLERRKLRLKLLEELFADAMAQVDPTFFMRLRESKYHYEDKTTGHSSKHILFIDKNYTDQDYYKEYPTIYHLRVALMKSGTDDIRKLFLAVHHILKYRGNFLYEGATFDSNASTLDDVLKQALENITFNCFDSSAAIGSIGQILMELGKTKSDKAKAIERLVDTYIITDEVDTSGKTQKEQVKEDKKRLKSFANLVLGLSASLTDLFGSVEDLDEDLKKLQIIGDTYDERRDDLAKVWGDEIHIIDDCKSVYDAIILMSIKEPGLTISESKVKAFKKHKDDLAILKSLLKSDRSIYNTMFKVDEKGLHNYVHYIKQGRTEETSCNREDFYKYTKKVVEGLPDSKDKEYILSEIELQTLLPLQRIKDNGVIPYQLHLEELKVILAKCGPKFPFLNEVADGFSVAEKLIKMLEFRIPYYVGPLNTHHNVDNGGFAWAVRKASGRVTPWNFDDKIDREKSAAAFIKNLTNKCTYLLGEDVLPKSSLLYSEFMLLNELNNVRIDGKPLEKAVKEHLIEAVFKQDHKKMTKNRIEQFLKDNNYIPEKHKPEITGLDGEIKNDLASYRDMVRILGNNFDLSMAEEIITDITIFGESKKMLRETLRNKFSSRLDDEAIKKLSKLRYRDWGRLSRKLLNVIEGCDKAGDGTPETIIILMRNFSYNLMELLGDKFSFMERIQEINAKLIEGQIVNPHDIIDDLALSPAVKRAVWQALRIVDEIVHIKKTLPARIFVEVTRSNKAEKKKKDSRQKRLSDLYAAIKKDDALLSGLTNEEFGGLKSGLAKYDDAALRSKKLYLYYTQMGRCAYTGEVIDLSQLNTDNYDIDHIYPRSLTKDDSFDNLVLCKRTANAQKSDTYPISKEIQKAQKAFWIFLKQQGLISERKYERLTRITPLTADDLSGFIARQLVETNQSVKAATTLLRRLYPGVDVVFVKAENVTDFRHDNDFIKVRSLNHHHHAKDAYLNIVVGNVYHERFTRNFRAFFKKNGANRTYNLAKMFNYDVKCTNAKDGKAWAVKTSMDTVKKMMDSNDVRVTKRVYEQKGQLSDINLTKASKVKADIYLPIKANDPIMSQNMKYGGYSDIKNAYYTIIEYSDKKNNSIKAFIPIPIFIATKTLTKQALLEYIKTVLPKANNLRIIYKKVYNDQLLKIDGFNYYLGGRSNDRFCIDNAIQLIVPLEIQFYIKLVEKFTAIISENKNIALKASSVKSRNPINNQVENITLEYTQKLFDYLVSKFNELIYLKMRGNKLTDVNNIGRKQFIKLSLEERCKALAELLNIFTNMNKKLSLSTINVSASRKVVNFKISSLDEFKIVNESITGLYSHEITIV

SEQ ID NO: 607 - protein, 1120 aa, Veillonella sp.
  source 1..1120: note = oral taxon 780 str. F0422
MGFKANLVNLFTDEDIEVILPEEKEFKSINLHEGIYEDVRDAYEDAWGDRFAIVDQCKVLHDIIVISSIIKPGQSLSEAKIESYNQHKEDLVLLKSVLKEDRKLYDDMFVVDTDKGTNYVKYTKQGVNGNTSATQEEFYKYVRKVVSVLPETEHTRRIVQKLEEGTFLPLQRISKNGVVPYQLHKEELVRILDKATVNFPFLNKVENGLTVADKIISILEFKIPYYVGPLNPTHSIENGGFAWVVRKEAGQVLPWNFEQKVDVQASAVKFIENLTNKCTYLIDQDVLPKYSLLYAEFSLLNELNNIRVNDKPLPADVKQAFIRDHFISLQDSKTATKKVVAKYLVDNNYVSQPPIITGMDQQIATKLTSHRDMTRILGEHFDHAMAEDIIRYITIFGESKDMLRQVLKNYYGDRLTTEQIKKLGKLTYTGWGRLSKKFLSDIWGMKKNDDDAEAGTIIEHMREGQENLMQLLSSSYSFIDVVQEYVTNVLGEKEKTAFEMLEDLSLSPMVKRSVWQTLRILDEIVSIRKELPKKIFVEVARTNKADKKRTQSRKALLEELYKQIKDEDVHVLQQELESKEDSALNSKKLYLYFTQMGRCMYSGRRIDIHELFTDKYDIDHIYPRSLTKDDSWHNIVLVEKQLNAEKTDRFPILSAIQSKQKGFWKLLWDRGFISEKKYDRLVRTTDLTDEELNQFINRQMVSTNQSVKAVTTLLHQLYPETEVVFSKAENVSDFRHDYDFVKVRSINHHHHAKDAYLNIVVGNVYHEKFTKNFLSFAKQKGTRRTYNLTKIFEYEIKLTEESKKVIWDPNIHMDIVKKMMKSNDVRVTQRAVPQKGGLSDETIYKKGIAKRGVYLPLKSSDERVRDVEKYGGRTSITISEYIILNIRDTSDQDRIEIFSLPLYIAGKKDIHKAIEEAYLSTCKKPASVVDIQILYRGLYIGSKVNINGFTYYMGGKTGSNVSIDSAVDVVMDITSSVYIKLLEKVAIKKIENPKTFRIENIKTSYNHKEVTVSKEQNIALYQELLKKLDTPLFSKMKGNKLEEFRTVGFDTFIALSLEEQASVLLEVLNVLTNFKTKRDITKIGMTSSRSTLGINISNTEQFSVITTSITGLYEQEIKIK

SEQ ID NO: 608 - protein, 1068 aa, Verminephrobacter eiseniae
MNKAVAYRLALDLGSTSLGWAIFRLNEAREPTAIIRAGVRIFSDGRNANSEPLAVHRRVARAMRRRRDRLLKRKKRMHDQLVQHGFFPAEVAERKELERLNPYQLRAKGLHEALTPGEFARALFHINQRRGFKSNRKTDRKDNDSGALKQAISELRKRIQDSDCATAGEWFWKERMQQKPEGVRGQWVRARYRKTPSTTDEGKKRIGYDLYVDRAMVEQEFDALWAAQAALQPGLFTEAARAELKDTLLYQRDLRPVKPGRCTLLPAEERAPLALPSTQRFRILQEVNNLRLLDEALREVPLNLAQRDAVVSALEGKKELSFAAIRKLLTLSGKFNLEDEKRAELKGNATSVILARKDLFGDAWAGFDAAVQDEIVWRLVSQESEGALIAWLQQHTGVDGVCAEAIVNTRLPDGYGRLSRKALERIVPALQREVCTYDKAVQAAGFAHHSDLGFDFDYAEDEVQQVGEHTIASTGEVQAQYAFKQLPYYGKALQRHVAFGSGDAKDHEEKCYGKIANPTVHIGLNQVRTVVNALIRRYGHPTEVVVELARDLKQSREQKQQTQREQADNQKRNEDIRKRIAPILETSPERVRDRDIKKWILWEELNKKDIADRHCPYSGERISATMLLSEAVEIEHILPFSRTLDDSLNNRTVAMRRANRIKGDRTPWEARADFEAQGWRYEAILQRAEGMPPRKRYRFAEDGYQRWLGKDRNFLARALNDTSYLSRLAANYLRLVCPQGVRVIPGQMTDKLRGKFGLNSVLGLDGKKNRNDHRHHAVDACVIGVTDQGLMQRFANASKQARENGLTRLVQDMLLPWWPSYYDHVERAVRHIRVSHRPDHGFEGAMMKGTAHGIREDGIREDGRIKQRPKAKGSADHKTITLIPIDEPRQLARHGVDAEGKPLPYKGYASGSNYCIEITKNGKGKWEGQVISTFDAYRIKAAADAAARAGQVISTVEADSIVRKSGWERLRGAQSQNGQPLVMRLVIGDSVRMEVDGRDEVMRVVKMSGKEMVFAPVREANVDKRNNMPDEQDPFTYTYKRADQLRKAKARQVTISPIGELRDPGFKG

SEQ ID NO: 609 - protein, 1440 aa, Weeksella virosa
MKTILGLDLGTNSIGWALVEQDFENKQGLILGMGSRIIPMDAGIIGKFAEGSSISQTAERTGYRSIRRLRERHLLRRERLHRVLNILKFLPEHYAAEIDFEKRFGQFLAETEPKLAWKKNAEGKFEFLFQRSFDEMVADFKANGQDIKIPYDWTIYYLRKKALTQKISPQELAWIILNFNQKRGYYQLRGEEEEENPNKKVEFYSLKIVDVVADEQPNKKGDTWYSLHLENGWVYRRSSKIPLYDWKDKVRDFIVTTDINEDGSEKLDKDGEVKRSFRAPKEDDWTLIKKKTEQEIEQFNQTVGSYIYEALLDNPTQKIRGKLVRTIERKFYKSELKKILEKQIELQPELFTEDLYNACARELYRRNVAHQQQLSSRDFVYLFLNDIIFYQRPLRSQKSLISNCSLEFRTIKDKDGNGQIIYLKAIPKSNPYYQEFRVWQWLYNLKIFTKEDDKDVTNQFINKVEDLEALFEFLMNQKEVNHTDILTYLIEPIVKSKYPNAKGKAFKDELKKELKKYRWNYVYDADKDESKSYPMNETRYELRKRLDKVENVPADFMTRKIEQHLWHIIYSVTDKIEFEKALKSFANKYDLHQESFVENFKRFKPFDSDYGTYSEKAIKKLLPLMRVGKYWSWDIIDDKTKTRIGKIITGEYDETIKNRVREKAIDLTEENHFQGLQLWLAQYIVYDRHSEADIAGKWNSVADLEQYLSEFKQHSLRNPIVEQVITETLRVVRDIWKQYGKGAKDYFDEIHIELGREMKNTAEERKRLSSIISENETTNLRIRAILEELMYDENMENVRPYSPMQQEALKIYEDGVLSSSVEIPEDIEKISKKSEPTKSEIQRYKLWLEQKYRSPYTGRPIPLSKLFTPAYQIEHIIPQARFFDDGFSNKVICESEVNALKDKMLGLEFIQNYYGQKVTTSFGEVTILTEDAYKAFVKEHYDKNRSKRNKLLLEEIPEKMIDRQMNDTRYISKYISKVLSNLVRGEKDDEGVNSKNIIPGNGKITGILKQDWGLNDVWNDLILPRFERMNQLTNSTDFTAWNEKHQKFLPSVPLELSKGFQKKRIDHRHHALDALIIACATRDHVNLLNNKHAKSRNERYDLQHKLRHTTPWQDKEGKVRTKFTEFKKPWETFTQDTKKELEKIVVNFKQNLRVINKATNYYEKIVDGKKVMFKQEGVNWAIRKPMHKETVSGKIDLPRVKVSKGKILTATRKSLDTSFNAKTILSITDTGIQKILLNYLKAKGNPELAFSPEGIEEMNQNISLYNDGKPHQPILKVRVFEQGSKFPLGETGNKTTKYVEAAKGTNLFFGVYEDNQGKRSYDTIPLNIVIERQKQGLNSVPETNEKGHRLLFSLSPNDLVYVPIEGEVFDETNPDVNRIYKVVSFSGSQMFCVRQDVATSIVYKLEFSSLNKMERTIDGIMIKEICIKLKVDRLGNISKA

SEQ ID NO: 610 - protein, 1409 aa, Wolinella succinogenes
MLVSPISVDLGGKNTGFFSFTDSLDNSQSGTVIYDESFVLSQVGRRSKRHSKRNNLRNKLVKRLFLLILQEHHGLSIDVLPDEIRGLFNKRGYTYAGFELDEKKKDALESDTLKEFLSEKLQSIDRDSDVEDFLNQIASNAESFKDYKKGFEAVFASATHSPNKKLELKDELKSEYGENAKELLAGLRVTKEILDEFDKQENQGNLPRAKYFEELGEYIATNEKVKSFFDSNSLKLTDMTKLIGNISNYQLKELRRYFNDKEMEKGDIWIPNKLHKITERFVRSWHPKNDADRQRRAELMKDLKSKEIMELLTTTEPVMTIPPYDDMNNRGAVKCQTLRLNEEYLDKHLPNWRDIAKRLNHGKFNDDLADSTVKGYSEDSTLLHRLLDTSKEIDIYELRGKKPNELLVKTLGQSDANRLYGFAQNYYELIRQKVRAGIWVPVKNKDDSLNLEDNSNMLKRCNHNPPHKKNQIHNLVAGILGVKLDEAKFAEFEKELWSAKVGNKKLSAYCKNIEELRKTHGNTFKIDIEELRKKDPAELSKEEKAKLRLTDDVILNEWSQKIANFFDIDDKHRQRFNNLFSMAQLHTVIDTPRSGFSSTCKRCTAENRFRSETAFYNDETGEFHKKATATCQRLPADTQRPFSGKIERYIDKLGYELAKIKAKELEGMEAKEIKVPIILEQNAFEYEESLRKSKTGSNDRVINSKKDRDGKKLAKAKENAEDRLKDKDKRIKAFSSGICPYCGDTIGDDGEIDHILPRSHTLKIYGTVFNPEGNLIYVHQKCNQAKADSIYKLSDIKAGVSAQWIEEQVANIKGYKTFSVLSAEQQKAFRYALFLQNDNEAYKKVVDWLRTDQSARVNGTQKYLAKKIQEKLTKMLPNKHLSFEFILADATEVSELRRQYARQNPLLAKAEKQAPSSHAIDAVMAFVARYQKVFKDGTPPNADEVAKLAMLDSWNPASNEPLTKGLSTNQKIEKMIKSGDYGQKNMREVFGKSIFGENAIGERYKPIVVQEGGYYIGYPATVKKGYELKNCKVVTSKNDIAKLEKIIKNQDLISLKENQYIKIFSINKQTISELSNRYFNMNYKNLVERDKEIVGLLEFIVENCRYYTKKVDVKFAPKYIHETKYPFYDDWRRFDEAWRYLQENQNKTSSKDRFVIDKSSLNEYYQPDKNEYKLDVDTQPIWDDFCRWYFLDRYKTANDKKSIRIKARKTFSLLAESGVQGKVFRAKRKIPTGYAYQALPMDNNVIAGDYANILLEANSKTLSLVPKSGISIEKQLDKKLDVIKKTDVRGLAIDNNSFFNADFDTHGIRLIVENTSVKVGNFPISAIDKSAKRMIFRALFEKEKGKRKKKTTISFKESGPVQDYLKVFLKKIVKIQLRTDGSISNIVVRKNAADFTLSFRSEHIQKLLK

SEQ ID NO: 611 - protein, 1059 aa, Wolinella succinogenes
MIERILGVDLGISSLGWAIVEYDKDDEAANRIIDCGVRLFTAAETPKKKESPNKARREARGIRRVLNRRRVRMNMIKKLFLRAGLIQDVDLDGEGGMFYSKANRADVWELRHDGLYRLLKGDELARVLIHIAKHRGYKFIGDDEADEESGKVKKAGVVLRQNFEAAGCRTVGEWLWRERGANGKKRNKHGDYEISIHRDLLVEEVEAIFVAQQEMRSTIATDALKAAYREIAFFVRPMQRIEKMVGHCTYFPEERRAPKSAPTAEKFIAISKFFSTVIIDNEGWEQKIIERKTLEELLDFAVSREKVEFRHLRKFLDLSDNEIFKGLHYKGKPKTAKKREATLFDPNEPTELEFDKVEAEKKAWISLRGAAKLREALGNEFYGRFVALGKHADEATKILTYYKDEGQKRRELTKLPLEAEMVERLVKIGFSDFLKLSLKAIRDILPAMESGARYDEAVLMLGVPHKEKSAILPPLNKTDIDILNPTVIRAFAQFRKVANALVRKYGAFDRVHFELAREINTKGEIEDIKESQRKNEKERKEAADWIAETSFQVPLTRKNILKKRLYIQQDGRCAYTGDVIELERLFDEGYCEIDHILPRSRSADDSFANKVLCLARANQQKTDRTPYEWFGHDAARWNAFETRTSAPSNRVRTGKGKIDRLLKKNFDENSEMAFKDRNLNDTRYMARAIKTYCEQYWVFKNSHTKAPVQVRSGKLTSVLRYQWGLESKDRESHTHHAVDAIIIAFSTQGMVQKLSEYYRFKETHREKERPKLAVPLANFRDAVEEATRIENTETVKEGVEVKRLLISRPPRARVTGQAHEQTAKPYPRIKQVKNKKKWRLAPIDEEKFESFKADRVASANQKNFYETSTIPRVDVYHKKGKFHLVPIYLHEMVLNELPNLSLGTNPEAMDENFFKFSIFKDDLISIQTQGTPKKPAKIIMGYFKNMHGANMVLSSINNSPCEGFTCTPVSMDKKHKDKCKLCPEENRIAGRCLQGFLDYWSQEGLRPPRKEFECDQGVKFALDVKKYQIDPLGYYYEVKQEKRLGTIPQMRSAKKLVKK

SEQ ID NO: 612 - protein, 1388 aa, Zunongwangia profunda
MKRILGLDLGTNSIGWALVNEAENEKEISKIIKLGVRVNPLTIDEKTNFEKGRPLSTNADRTLKRGARRNLQRYKLRRENLIEILIDNHIITKETPLTEIGKGTTYQTLSLRAKAVRERIDLEDFAKVLLAINKKRGYKSSRKASNDEEGQAIDGMAIAKELYERGITPGQYVLELLENDRKYIPDFYRSDLKQEFNKIWNNQKTFYPEILTDELFKELDGKNKSQTWAICQKPFNIKGIKRITKGREKTIENYHWRVKGLSGKLNLEKLAIILQEINNDINQSSGYLGGISDKSKKLYLNKETVGEFLYKQIAKNPHTSLKNQVFYRHDYLDEFEQIWKTQSNFNANLTDELKQEIRDVIIFYQRKIKSQKSLISFCQFESWEQEYFDKETGKTKTRTVGRRVIPKSSPLFQEFKIWQNLNHLVFTNSETDEKIEIKEVEQEIRKELFEELNLRGDLNPNDLLKILRSQFKIGKLSNWKCNFEKIEGNRTNAALFNIYQKISDFEGYGIDWNKSNAKKIRKELKATFPEIGIDASILEFDAYKKQLTNQSSYELWHLLYSAEEDFKISEQDKLIYGNSSVSLKKKLHLKFGFNPEYAKMLANLSLMSDYGNLSAKAIKKILPYLEDGHLYSEACRLAGYNHSKSLTAEELEKFEPKAKLDLLKKNSLRNPVVEKILNQMVNVVNQVIDTYGKPDGVRIELARELKKSAKERAEMTKGIADGTRRNEEIKKIITQKFGIPNPTKSDLVRYRLWQELESRGYKDIFTDKYISPDKIFSSEIDIEHIIPKALLFDDSFSNKTLSFRNVNLKKANRTALDFITQDYQSNVEAYKERVETWNKDNHISKGKRNKLLMSLKDIPDGFIERDLRNSQYIARKAKRMLYEVFPNEVLATSGSITDKLRSDWDLINVMKELNLPKYKALGLTEYEERLDKGTEELFKHEVIKDWTKRNDHRHHAMDALAVAFTTHNHIQYINNLNARKDITQDNHPIIKNIENLITEVNSKGKRVFKAPMSSFRESAKEQIEAILVSFKNKNKVVTKNINQTKKEGGFNYQNAKTPRGQLHKETIYGKSKQPLEKPVKINNRFCKKQVGLIINFKEQEAVLHHLKKYDNNEKIAFSNKTLKSDPIQVNGSPLREVKIFEEIFTIRKDINPDNFKTQKHLDKIIDKGIKEVMKKRLEEYNGDFKTAFSDLDKNPIWLNQSKGITIKRATISGVTNAEPLHQAKDHLGNIILDDNGKEIPIDYVSTGNNHHVAIYQDESGNLQEEVVSFYEAVIRKNQDQPIIKKRHPKGWKFLFTMKQNEMFVFSSENFNPSEIDLLDEKNAAIISPNLFRVQKIATKNYMFRHHLETEVTNNLDFTYRHFQATEWLRNLCKVRIDHIGRIVQIGEY

SEQ ID NO: 613 - RNA, 22 nt, Homo sapiens
  source 1..22: mol_type = genomic RNA
tgctcaggttgcacagctggga

SEQ ID NO: 614 - RNA, 22 nt, Homo sapiens
  source 1..22: mol_type = genomic RNA
tcccagctgtgcaacctgagca

SEQ ID NO: 615 - RNA, 22 nt, Homo sapiens
  source 1..22: mol_type = genomic RNA
tcaggtgtggaaactgaggcag

SEQ ID NO: 616 - RNA, 22 nt, Homo sapiens
  source 1..22: mol_type = genomic RNA
ctgcctcagtttccacacctga

SEQ ID NO: 617 - RNA, 22 nt, Homo sapiens
  source 1..22: mol_type = genomic RNA
caaaaccgcgattactcttgca

SEQ ID NO: 618 - RNA, 22 nt, Homo sapiens
  source 1..22: mol_type = genomic RNA
tgcaagagtaatcgcggttttg

SEQ ID NO: 619 - RNA, 21 nt, Homo sapiens
  source 1..21: mol_type = genomic RNA
aaaagtaattgtggtttttgc

SEQ ID NO: 620 - RNA, 21 nt, Homo sapiens
  source 1..21: mol_type = genomic RNA
gcaaaaaccacaattactttt

SEQ ID NO: 621 - RNA, 21 nt, Homo sapiens
  source 1..21: mol_type = genomic RNA
aaaaactgcaatcacttttgc

SEQ ID NO: 622 - RNA, 21 nt, Homo sapiens
  source 1..21: mol_type = genomic RNA
gcaaaagtgattgcagttttt

SEQ ID NO: 623 - RNA, 22 nt, Homo sapiens
  source 1..22: mol_type = genomic RNA
caaaagtgattgtggtttttgc

SEQ ID NO: 624 - RNA, 22 nt, Homo sapiens
  source 1..22: mol_type = genomic RNA
gcaaaaaccacaatcacttttg

SEQ ID NO: 625 - RNA, 22 nt, Homo sapiens
  source 1..22: mol_type = genomic RNA
agcagtgtttgttttgcccaca

SEQ ID NO: 626 - RNA, 22 nt, Homo sapiens
  source 1..22: mol_type = genomic RNA
tgtgggcaaaacaaacactgct

SEQ ID NO: 627 - RNA, 22 nt, Homo sapiens
  source 1..22: mol_type = genomic RNA
tcgggcgcaagagcactgcagt

SEQ ID NO: 628 - RNA, 22 nt, Homo sapiens
  source 1..22: mol_type = genomic RNA
actgcagtgctcttgcgcccga

SEQ ID NO: 629 - RNA, 21 nt, Homo sapiens
  source 1..21: mol_type = genomic RNA
acacttgttgggatgacctgc

SEQ ID NO: 630 - RNA, 21 nt, Homo sapiens
  source 1..21: mol_type = genomic RNA
gcaggtcatcccaacaagtgt

SEQ ID NO: 631 - RNA, 24 nt, Homo sapiens
  source 1..24: mol_type = genomic RNA
aggagctatccactccaggtgtcc

SEQ ID NO: 632 - RNA, 24 nt, Homo sapiens
  source 1..24: mol_type = genomic RNA
ggacacctggagtggatagctcct

SEQ ID NO: 633 - RNA, 23 nt, Homo sapiens
  source 1..23: mol_type = genomic RNA
ccagagcagcctgcggtaacagt

SEQ ID NO: 634 - RNA, 23 nt, Homo sapiens
  source 1..23: mol_type = genomic RNA
actgttaccgcaggctgctctgg

SEQ ID NO: 635 - RNA, 22 nt, Homo sapiens
  source 1..22: mol_type = genomic RNA
agttgccagggctgcctttggt

SEQ ID NO: 636 - RNA, 22 nt, Homo sapiens
  source 1..22: mol_type = genomic RNA
accaaaggcagccctggcaact

SEQ ID NO: 637 - RNA, 21 nt, Homo sapiens
  source 1..21: mol_type = genomic RNA
tagaccatctttctagagtat

SEQ ID NO: 638 - RNA, 21 nt, Homo sapiens
  source 1..21: mol_type = genomic RNA
atactctagaaagatggtcta

SEQ ID NO: 639 - RNA, 22 nt, Homo sapiens
  source 1..22: mol_type = genomic RNA
agctctagaaagattgttgacc

SEQ ID NO: 640 - RNA, 22 nt, Homo sapiens
  source 1..22: mol_type = genomic RNA
ggtcaacaatctttctagagct

SEQ ID NO: 641 - RNA, 21 nt, Homo sapiens
  source 1..21: mol_type = genomic RNA
gggactaggatgcagacctcc

SEQ ID NO: 642 - RNA, 21 nt, Homo sapiens
  source 1..21: mol_type = genomic RNA
ggaggtctgcatcctagtccc

SEQ ID NO: 643 - RNA, 23 nt, Homo sapiens
  source 1..23: mol_type = genomic RNA
aggtctgcattcaaatccccaga

SEQ ID NO: 644 - RNA, 23 nt, Homo sapiens
  source 1..23: mol_type = genomic RNA
tctggggatttgaatgcagacct

SEQ ID NO: 645 - RNA, 20 nt, Homo sapiens
  source 1..20: mol_type = genomic RNA
cattacagcacagccattct

SEQ ID NO: 646 - RNA, 20 nt, Homo sapiens
  source 1..20: mol_type = genomic RNA
agaatggctgtgctgtaatg

SEQ ID NO: 647 - RNA, 21 nt, Homo sapiens
  source 1..21: mol_type = genomic RNA
tctggctgtgctgtaatgcag

SEQ ID NO: 648 - RNA, 21 nt, Homo sapiens
  source 1..21: mol_type = genomic RNA
ctgcattacagcacagccaga

SEQ ID NO: 649 - RNA, 21 nt, Homo sapiens
  source 1..21: mol_type = genomic RNA
tgacttctacctcttccaaag

SEQ ID NO: 650 - RNA, 21 nt, Homo sapiens
  source 1..21: mol_type = genomic RNA
ctttggaagaggtagaagtca

SEQ ID NO: 651 - RNA, 22 nt, Homo sapiens
  source 1..22: mol_type = genomic RNA
ttggaataggggatatctcagc

SEQ ID NO: 652 - RNA, 22 nt, Homo sapiens
  source 1..22: mol_type = genomic RNA
gctgagatatcccctattccaa

SEQ ID NO: 653 - RNA, 22 nt, Homo sapiens
  source 1..22: mol_type = genomic RNA
tcgtatcagagattccagacac

SEQ ID NO: 654 - RNA, 22 nt, Homo sapiens
  source 1..22: mol_type = genomic RNA
gtgtctggaatctctgatacga

SEQ ID NO: 655 - RNA, 23 nt, Homo sapiens
  source 1..23: mol_type = genomic RNA
actgggatgtcactgaatatggt

SEQ ID NO: 656 - RNA, 23 nt, Homo sapiens
  source 1..23: mol_type = genomic RNA
accatattcagtgacatcccagt

SEQ ID NO: 657 - RNA, 22 nt, Homo sapiens
  source 1..22: mol_type = genomic RNA
caaagtccttcctatttttccc

SEQ ID NO: 658 - RNA, 22 nt, Homo sapiens
  source 1..22: mol_type = genomic RNA
gggaaaaataggaaggactttg

SEQ ID NO: 659 - RNA, 21 nt, Homo sapiens
  source 1..21: mol_type = genomic RNA
gaagaataggagggactttgt

SEQ ID NO: 660 - RNA, 21 nt, Homo sapiens
  source 1..21: mol_type = genomic RNA
acaaagtccctcctattcttc

SEQ ID NO: 661 - RNA, 22 nt, Homo sapiens
  source 1..22: mol_type = genomic RNA
tgggccatgcatttctagaact

SEQ ID NO: 662 - RNA, 22 nt, Homo sapiens
  source 1..22: mol_type = genomic RNA
agttctagaaatgcatggccca

SEQ ID NO: 663 - RNA, 21 nt, Homo sapiens
  source 1..21: mol_type = genomic RNA
tctagaaatgcatgacccacc

SEQ ID NO: 664 - RNA, 21 nt, Homo sapiens
  source 1..21: mol_type = genomic RNA
ggtgggtcatgcatttctaga

SEQ ID NO: 665 - RNA, 22 nt, Homo sapiens
  source 1..22: mol_type = genomic RNA
ttccactgccactacctaattt

SEQ ID NO: 666 - RNA, 22 nt, Homo sapiens
  source 1..22: mol_type = genomic RNA
aaattaggtagtggcagtggaa

SEQ ID NO: 667 - RNA, 21 nt, Homo sapiens
  source 1..21: mol_type = genomic RNA
attaggtagtggcagtggaac

SEQ ID NO: 668 - RNA, 21 nt, Homo sapiens
  source 1..21: mol_type = genomic RNA
gttccactgccactacctaat

SEQ ID NO: 669 - RNA, 21 nt, Homo sapiens
  source 1..21: mol_type = genomic RNA
caccgactctgtctcctgcag

SEQ ID NO: 670 - RNA, 21 nt, Homo sapiens
  source 1..21: mol_type = genomic RNA
ctgcaggagacagagtcggtg

SEQ ID NO: 671 - RNA, 22 nt, Homo sapiens
  source 1..22: mol_type = genomic RNA
cagcaggggagagagaggagtc

SEQ ID NO: 672 - RNA, 22 nt, Homo sapiens
  source 1..22: mol_type = genomic RNA
gactcctctctctcccctgctg

SEQ ID NO: 673 - RNA, 22 nt, Homo sapiens
  source 1..22: mol_type = genomic RNA
ttccagcccttctaatggtagg

SEQ ID NO: 674 - RNA, 22 nt, Homo sapiens
  source 1..22: mol_type = genomic RNA
cctaccattagaagggctggaa

SEQ ID NO: 675 - RNA, 22 nt, Homo sapiens
  source 1..22: mol_type = genomic RNA
taccattagaagagctggaaga

SEQ ID NO: 676 - RNA, 22 nt, Homo sapiens
  source 1..22: mol_type = genomic RNA
tcttccagctcttctaatggta

SEQ ID NO: 677 - RNA, 21 nt, Homo sapiens
  source 1..21: mol_type = genomic RNA
tcaagtgtcatctgtccctag

SEQ ID NO: 678 - RNA, 21 nt, Homo sapiens
  source 1..21: mol_type = genomic RNA
ctagggacagatgacacttga

SEQ ID NO: 679 - RNA, 23 nt, Homo sapiens
  source 1..23: mol_type = genomic RNA
tttgggattgacgccacatgtct

SEQ ID NO: 680 - RNA, 23 nt, Homo sapiens
  source 1..23: mol_type = genomic RNA
agacatgtggcgtcaatcccaaa

SEQ ID NO: 681 - RNA, 21 nt, Homo sapiens
  source 1..21: mol_type = genomic RNA
ctgcctgttcttccactccag

SEQ ID NO: 682 - RNA, 21 nt, Homo sapiens
  source 1..21: mol_type = genomic RNA
ctggagtggaagaacaggcag

SEQ ID NO: 683 - RNA, 23 nt, Homo sapiens
  source 1..23: mol_type = genomic RNA
tatggagtggactttcagctggc

SEQ ID NO: 684 - RNA, 23 nt, Homo sapiens
  source 1..23: mol_type = genomic RNA
gccagctgaaagtccactccata

SEQ ID NO: 685 - RNA, 22 nt, Homo sapiens
  source 1..22: mol_type = genomic RNA
cctcaccatcccttctgcctgc

SEQ ID NO: 686 - RNA, 22 nt, Homo sapiens
  source 1..22: mol_type = genomic RNA
gcaggcagaagggatggtgagg

SEQ ID NO: 687 - RNA, 23 nt, Homo sapiens
  source 1..23: mol_type = genomic RNA
caggcagaagtggggctgacagg

SEQ ID NO: 688 - RNA, 23 nt, Homo sapiens
  source 1..23: mol_type = genomic RNA
cctgtcagccccacttctgcctg

SEQ ID NO: 689 - RNA, 20 nt, Homo sapiens
  source 1..20: mol_type = genomic RNA
tctcttcatctaccccccag

SEQ ID NO: 690 - RNA, 20 nt, Homo sapiens
  source 1..20: mol_type = genomic RNA
ctggggggtagatgaagaga

SEQ ID NO: 691 - RNA, 21 nt, Homo sapiens
  source 1..21: mol_type = genomic RNA
ttggagggtgtggaagacatc

SEQ ID NO: 692 - RNA, 21 nt, Homo sapiens
  source 1..21: mol_type = genomic RNA
gatgtcttccacaccctccaa

SEQ ID NO: 693 - RNA, 22 nt, Homo sapiens
  source 1..22: mol_type = genomic RNA
ctgccagccccgttccagggca

SEQ ID NO: 694 - RNA, 22 nt, Homo sapiens
  source 1..22: mol_type = genomic RNA
tgccctggaacggggctggcag

SEQ ID NO: 695 - RNA, 23 nt, Homo sapiens
  source 1..23: mol_type = genomic RNA
acaaagtacagcattagccttag

SEQ ID NO: 696 - RNA, 23 nt, Homo sapiens
  source 1..23: mol_type = genomic RNA
ctaaggctaatgctgtactttgt

SEQ ID NO: 697 - RNA, 23 nt, Homo sapiens
  source 1..23: mol_type = genomic RNA
aaaggtcattgtaaggttaatgc

SEQ ID NO: 698 - RNA, 23 nt, Homo sapiens
  source 1..23: mol_type = genomic RNA
gcattaaccttacaatgaccttt

SEQ ID NO: 699 - RNA, 22 nt, Homo sapiens
  source 1..22: mol_type = genomic RNA
tgaggctaatgcactacttcac

SEQ ID NO: 700 - RNA, 22 nt, Homo sapiens
  source 1..22: mol_type = genomic RNA
gtgaagtagtgcattagcctca

SEQ ID NO: 701 - RNA, 24 nt, Homo sapiens
  source 1..24: mol_type = genomic RNA
tatagagagcaggaagattaatgt

SEQ ID NO: 702 - RNA, 24 nt, Homo sapiens
  source 1..24: mol_type = genomic RNA
acattaatcttcctgctctctata

SEQ ID NO: 703 - RNA, 23 nt, Homo sapiens
  source 1..23: mol_type = genomic RNA
gtgcttcatcgtaattaacctta

SEQ ID NO: 704 - RNA, 23 nt, Homo sapiens
  source 1..23: mol_type = genomic RNA
taaggttaattacgatgaagcac

SEQ ID NO: 705 - RNA, 24 nt, Homo sapiens
  source 1..24: mol_type = genomic RNA
gtggaaagcatgcatccagggtgt

SEQ ID NO: 706 - RNA, 24 nt, Homo sapiens
  source 1..24: mol_type = genomic RNA
acaccctggatgcatgctttccac

SEQ ID NO: 707 - RNA, 22 nt, Homo sapiens
  source 1..22: mol_type = genomic RNA
agacacatttggagagggaacc

SEQ ID NO: 708 - RNA, 22 nt, Homo sapiens
  source 1..22: mol_type = genomic RNA
ggttccctctccaaatgtgtct

SEQ ID NO: 709 - RNA, 22 nt, Homo sapiens
  source 1..22: mol_type = genomic RNA
ttccctttgtcatcctatgcct

SEQ ID NO: 710 - RNA, 22 nt, Homo sapiens
  source 1..22: mol_type = genomic RNA
aggcataggatgacaaagggaa

SEQ ID NO: 711 - RNA, 21 nt, Homo sapiens
  source 1..21: mol_type = genomic RNA
gctgggaaggcaaagggacgt

SEQ ID NO: 712 - RNA, 21 nt, Homo sapiens
  source 1..21: mol_type = genomic RNA
acgtccctttgccttcccagc

SEQ ID NO: 713 - RNA, 21 nt, Homo sapiens
  source 1..21: mol_type = genomic RNA
taccacagggtagaaccacgg

SEQ ID NO: 714 - RNA, 21 nt, Homo sapiens
  source 1..21: mol_type = genomic RNA
ccgtggttctaccctgtggta

SEQ ID NO: 715 - RNA, 22 nt, Homo sapiens
  source 1..22: mol_type = genomic RNA
ggctggagcgagtgcagtggtg

SEQ ID NO: 716 - RNA, 22 nt, Homo sapiens
  source 1..22: mol_type = genomic RNA
caccactgcactcgctccagcc

SEQ ID NO: 717 - RNA, 18 nt, Homo sapiens
  source 1..18: mol_type = genomic RNA
ccaggctctgcagtggga

SEQ ID NO: 718 - RNA, 18 nt, Homo sapiens
  source 1..18: mol_type = genomic RNA
tcccactgcagagcctgg

SEQ ID NO: 719 - RNA, 22 nt, Homo sapiens
  source 1..22: mol_type = genomic RNA
ctgggaggtgtgatattgtggt

SEQ ID NO: 720 - RNA, 22 nt, Homo sapiens
  source 1..22: mol_type = genomic RNA
accacaatatcacacctcccag

SEQ ID NO: 721 - RNA, 22 nt, Homo sapiens
  source 1..22: mol_type = genomic RNA
gggaggtgtgatctcacactcg

SEQ ID NO: 722 - RNA, 22 nt, Homo sapiens
  source 1..22: mol_type = genomic RNA
cgagtgtgagatcacacctccc

SEQ ID NO: 723 - RNA, 22 nt, Homo sapiens
  source 1..22: mol_type = genomic RNA
tgtgatatcatggttcctggga

SEQ ID NO: 724 - RNA, 22 nt, Homo sapiens
  source 1..22: mol_type = genomic RNA
tcccaggaaccatgatatcaca

SEQ ID NO: 725 - RNA, 22 nt, Homo sapiens
  source 1..22: mol_type = genomic RNA
tgtgatatcgtgcttcctggga

SEQ ID NO: 726 - RNA, 22 nt, Homo sapiens
  source 1..22: mol_type = genomic RNA
tcccaggaagcacgatatcaca

SEQ ID NO: 727 - RNA, 18 nt, Homo sapiens
  source 1..18: mol_type = genomic RNA
ggtgggcttcccggaggg

SEQ ID NO: 728 - RNA, 18 nt, Homo sapiens
  source 1..18: mol_type = genomic RNA
ccctccgggaagcccacc

SEQ ID NO: 729 - RNA, 18 nt, Homo sapiens
  source 1..18: mol_type = genomic RNA
cactgcaggactcagcag

SEQ ID NO: 730 - RNA, 18 nt, Homo sapiens
  source 1..18: mol_type = genomic RNA
ctgctgagtcctgcagtg

SEQ ID NO: 731 - RNA, 17 nt, Homo sapiens
  source 1..17: mol_type = genomic RNA
tgagggaggagactgca

SEQ ID NO: 732 - RNA, 17 nt, Homo sapiens
  source 1..17: mol_type = genomic RNA
tgcagtctcctccctca

SEQ ID NO: 733 - RNA, 18 nt, Homo sapiens
  source 1..18: mol_type = genomic RNA
gaggctgaaggaagatgg

SEQ ID NO: 734 - RNA, 18 nt, Homo sapiens
  source 1..18: mol_type = genomic RNA
ccatcttccttcagcctc

SEQ ID NO: 735 - RNA, 22 nt, Homo sapiens
  source 1..22: mol_type = genomic RNA
gtcactgatgtctgtagctgag

SEQ ID NO: 736 - RNA, 22 nt, Homo sapiens
  source 1..22: mol_type = genomic RNA
ctcagctacagacatcagtgac

SEQ ID NO: 737 - RNA, 22 nt, Homo sapiens
  source 1..22: mol_type = genomic RNA
acctgtctgtggaaaggagcta

SEQ ID NO: 738 - RNA, 22 nt, Homo sapiens
  source 1..22: mol_type = genomic RNA
tagctcctttccacagacaggt

SEQ ID NO: 739 - RNA, 22 nt, Homo sapiens
  source 1..22: mol_type = genomic RNA
agagttaactcaaaatggacta

SEQ ID NO: 740 - RNA, 22 nt, Homo sapiens
  source 1..22: mol_type = genomic RNA
tagtccattttgagttaactct

SEQ ID NO: 741 - RNA, 22 nt, Homo sapiens
  source 1..22: mol_type = genomic RNA
tgttgggattcagcaggaccat

SEQ ID NO: 742 - RNA, 22 nt, Homo sapiens
  source 1..22: mol_type = genomic RNA
atggtcctgctgaatcccaaca

SEQ ID NO: 743 - RNA, 17 nt, Homo sapiens
  source 1..17: mol_type = genomic RNA
gaagatggacgtacttt

SEQ ID NO: 744 - RNA, 17 nt, Homo sapiens
  source 1..17: mol_type = genomic RNA
aaagtacgtccatcttc

SEQ ID NO: 745 - RNA, 21 nt, Homo sapiens
  source 1..21: mol_type = genomic RNA
tctgaatagagtctgaagagt

SEQ ID NO: 746 - RNA, 21 nt, Homo sapiens
  source 1..21: mol_type = genomic RNA
actcttcagactctattcaga

SEQ ID NO: 747 - RNA, 22 nt, Homo sapiens
  source 1..22: mol_type = genomic RNA
caaggagacgggaacatggagc

SEQ ID NO: 748 - RNA, 22 nt, Homo sapiens
  source 1..22: mol_type = genomic RNA
gctccatgttcccgtctccttg

SEQ ID NO: 749 - RNA, 20 nt, Homo sapiens
  source 1..20: mol_type = genomic RNA
aaaagctgggctgagaggcg

SEQ ID NO: 750 - RNA, 20 nt, Homo sapiens
  source 1..20: mol_type = genomic RNA
cgcctctcagcccagctttt

SEQ ID NO: 751 - RNA, 18 nt, Homo sapiens
  source 1..18: mol_type = genomic RNA
aggctggagtgagcggag

SEQ ID NO: 752 - RNA, 18 nt, Homo sapiens
  source 1..18: mol_type = genomic RNA
ctccgctcactccagcct

SEQ ID NO: 753 - RNA, 22 nt, Homo sapiens
  source 1..22: mol_type = genomic RNA
gcgactctgaaaactagaaggt

SEQ ID NO: 754 - RNA, 22 nt, Homo sapiens
  source 1..22: mol_type = genomic RNA
accttctagttttcagagtcgc

SEQ ID NO: 755 - RNA, 20 nt, Homo sapiens
  source 1..20: mol_type = genomic RNA
aaagactctgcaagatgcct

SEQ ID NO: 756 - RNA, 20 nt, Homo sapiens
  source 1..20: mol_type = genomic RNA
aggcatcttgcagagtcttt

SEQ ID NO: 757 - RNA, 21 nt, Homo sapiens
  source 1..21: mol_type = genomic RNA
acaggagtgggggtgggacat

SEQ ID NO: 758 - RNA, 21 nt, Homo sapiens
  source 1..21: mol_type = genomic RNA
atgtcccacccccactcctgt

SEQ ID NO: 759 - RNA, 21 nt, Homo sapiens
  source 1..21: mol_type = genomic RNA
cgtcccaccccccactcctgt

SEQ ID NO: 760 - RNA, 21 nt, Homo sapiens
  source 1..21: mol_type = genomic RNA
acaggagtggggggtgggacg

SEQ ID NO: 761 - RNA, 18 nt, Homo sapiens
  source 1..18: mol_type = genomic RNA
aggagaagtaaagtagaa

SEQ ID NO: 762 - RNA, 18 nt, Homo sapiens
  source 1..18: mol_type = genomic RNA
ttctactttacttctcct

SEQ ID NO: 763 - RNA, 22 nt, Homo sapiens
  source 1..22: mol_type = genomic RNA
atggccagagctcacacagagg

SEQ ID NO: 764 - RNA, 22 nt, Homo sapiens
  source 1..22: mol_type = genomic RNA
cctctgtgtgagctctggccat

SEQ ID NO: 765 - RNA, 21 nt, Homo sapiens
  source 1..21: mol_type = genomic RNA
tgggctcagggtacaaaggtt

SEQ ID NO: 766 - RNA, 21 nt, Homo sapiens
  source 1..21: mol_type = genomic RNA
aacctttgtaccctgagccca

SEQ ID NO: 767 - RNA, 21 nt, Homo sapiens
  source 1..21: mol_type = genomic RNA
cacaggcttagaaaagacagt

SEQ ID NO: 768 - RNA, 21 nt, Homo sapiens
  source 1..21: mol_type = genomic RNA
actgtcttttctaagcctgtg

SEQ ID NO: 769 - RNA, 22 nt, Homo sapiens
  source 1..22: mol_type = genomic RNA
gtgactgataccttggaggcat

SEQ ID NO: 770 - RNA, 22 nt, Homo sapiens
  source 1..22: mol_type = genomic RNA
atgcctccaaggtatcagtcac

SEQ ID NO: 771 - RNA, 22 nt, Homo sapiens
  source 1..22: mol_type = genomic RNA
tgtcgtggggcttgctggcttg

SEQ ID NO: 772 - RNA, 22 nt, Homo sapiens
  source 1..22: mol_type = genomic RNA
caagccagcaagccccacgaca

SEQ ID NO: 773 - RNA, 17 nt, Homo sapiens
  source 1..17: mol_type = genomic RNA
acagggaggagattgta

SEQ ID NO: 774 - RNA, 17 nt, Homo sapiens
  source 1..17: mol_type = genomic RNA
tacaatctcctccctgt

SEQ ID NO: 775 - RNA, 17 nt, Homo sapiens
  source 1..17: mol_type = genomic RNA
gccggacaagagggagg

SEQ ID NO: 776 - RNA, 17 nt, Homo sapiens
  source 1..17: mol_type = genomic RNA
cctccctcttgtccggc

SEQ ID NO: 777 - RNA, 17 nt, Homo sapiens
  source 1..17: mol_type = genomic RNA
ttggaggcgtgggtttt

SEQ ID NO: 778 - RNA, 17 nt, Homo sapiens
  source 1..17: mol_type = genomic RNA
aaaacccacgcctccaa

SEQ ID NO: 779 - RNA, 18 nt, Homo sapiens
  source 1..18: mol_type = genomic RNA
ctcgagttggaagaggcg

SEQ ID NO: 780 - RNA, 18 nt, Homo sapiens
  source 1..18: mol_type = genomic RNA
cgcctcttccaactcgag

SEQ ID NO: 781 - RNA, 21 nt, Homo sapiens
  source 1..21: mol_type = genomic RNA
cacggcaaaagaaacaatcca

SEQ ID NO: 782 - RNA, 21 nt, Homo sapiens
  source 1..21: mol_type = genomic RNA
tggattgtttcttttgccgtg

SEQ ID NO: 783 - RNA, 22 nt, Homo sapiens
  source 1..22: mol_type = genomic RNA
agattgtttcttttgccgtgca

SEQ ID NO: 784 - RNA, 22 nt, Homo sapiens
  source 1..22: mol_type = genomic RNA
tgcacggcaaaagaaacaatct

SEQ ID NO: 785 - RNA, 17 nt, Homo sapiens
  source 1..17: mol_type = genomic RNA
ggtgggggctgttgttt

SEQ ID NO: 786 - RNA, 17 nt, Homo sapiens
  source 1..17: mol_type = genomic RNA
aaacaacagcccccacc

SEQ ID NO: 787 - RNA, 20 nt, Homo sapiens
  source 1..20: mol_type = genomic RNA
ggctccttggtctaggggta

SEQ ID NO: 788 - RNA, 20 nt, Homo sapiens
  source 1..20: mol_type = genomic RNA
tacccctagaccaaggagcc

SEQ ID NO: 789 - RNA, 22 nt, Homo sapiens
  source 1..22: mol_type = genomic RNA
cgtcccggggctgcgcgaggca

SEQ ID NO: 790 - RNA, 22 nt, Homo sapiens
  source 1..22: mol_type = genomic RNA
tgcctcgcgcagccccgggacg

SEQ ID NO: 791 - RNA, 22 nt, Homo sapiens
  source 1..22: mol_type = genomic RNA
tggggatttggagaagtggtga

SEQ ID NO: 792 - RNA, 22 nt, Homo sapiens
  source 1..22: mol_type = genomic RNA
tcaccacttctccaaatcccca

SEQ ID NO: 793 - RNA, 17 nt, Homo sapiens
  source 1..17: mol_type = genomic RNA
tggtagagctgaggaca

SEQ ID NO: 794 - RNA, 17 nt, Homo sapiens
  source 1..17: mol_type = genomic RNA
tgtcctcagctctacca

SEQ ID NO: 795 - RNA, 23 nt, Homo sapiens
  source 1..23: mol_type = genomic RNA
ttgaattcttggccttaagtgat

SEQ ID NO: 796 - RNA, 23 nt, Homo sapiens
  source 1..23: mol_type = genomic RNA
atcacttaaggccaagaattcaa

SEQ ID NO: 797 - RNA, 20 nt, Homo sapiens
  source 1..20: mol_type = genomic RNA
gagcttggtctgtagcggtt

SEQ ID NO: 798 - RNA, 20 nt, Homo sapiens
  source 1..20: mol_type = genomic RNA
aaccgctacagaccaagctc

SEQ ID NO: 799 - RNA, 20 nt, Homo sapiens
  source 1..20: mol_type = genomic RNA
ggatccgagtcacggcacca

SEQ ID NO: 800 - RNA, 20 nt, Homo sapiens
  source 1..20: mol_type = genomic RNA
tggtgccgtgactcggatcc

SEQ ID NO: 801 - RNA, 17 nt, Homo sapiens
  source 1..17: mol_type = genomic RNA
agggtgtgtgtgttttt

SEQ ID NO: 802 - RNA, 17 nt, Homo sapiens
  source 1..17: mol_type = genomic RNA
aaaaacacacacaccct

SEQ ID NO: 803 - RNA, 17 nt, Homo sapiens
  source 1..17: mol_type = genomic RNA
cctggtggcttcctttt

SEQ ID NO: 804 - RNA, 17 nt, Homo sapiens
  source 1..17: mol_type = genomic RNA
aaaaggaagccaccagg

SEQ ID NO: 805 - RNA, 22 nt, Homo sapiens
  source 1..22: mol_type = genomic RNA
tcacaaggtattgactggcgta

SEQ ID NO: 806 - RNA, 22 nt, Homo sapiens
  source 1..22: mol_type = genomic RNA
tacgccagtcaataccttgtga

SEQ ID NO: 807 - RNA, 19 nt, Homo sapiens
  source 1..19: mol_type = genomic RNA
agaggtaggtgtggaagaa

SEQ ID NO: 808 - RNA, 19 nt, Homo sapiens
  source 1..19: mol_type = genomic RNA
ttcttccacacctacctct

SEQ ID NO: 809 - RNA, 22 nt, Homo sapiens
  source 1..22: mol_type = genomic RNA
ccaggaggcggaggaggtggag

SEQ ID NO: 810 - RNA, 22 nt, Homo sapiens
  source 1..22: mol_type = genomic RNA
ctccacctcctccgcctcctgg

SEQ ID NO: 811 - RNA, 22 nt, Homo sapiens
  source 1..22: mol_type = genomic RNA
atagtggttgtgaatttacctt

SEQ ID NO: 812 - RNA, 22 nt, Homo sapiens
  source 1..22: mol_type = genomic RNA
aaggtaaattcacaaccactat

SEQ ID NO: 813 - RNA, 23 nt, Homo sapiens
  source 1..23: mol_type = genomic RNA
gattgagactagtagggctaggc

SEQ ID NO: 814 - RNA, 23 nt, Homo sapiens
  source 1..23: mol_type = genomic RNA
gcctagccctactagtctcaatc

SEQ ID NO: 815 - RNA, 23 nt, Homo sapiens
  source 1..23: mol_type = genomic RNA
tgacacggagggtggcttgggaa

SEQ ID NO: 816 - RNA, 23 nt, Homo sapiens
  source 1..23: mol_type = genomic RNA
ttcccaagccaccctccgtgtca

SEQ ID NO: 817 - RNA, 17 nt, Homo sapiens
  source 1..17: mol_type = genomic RNA
gagactggggtggggcc

SEQ ID NO: 818 - RNA, 17 nt, Homo sapiens
  source 1..17: mol_type = genomic RNA
ggccccaccccagtctc

SEQ ID NO: 819 - RNA, 21 nt, Homo sapiens
  source 1..21: mol_type = genomic RNA
aaggtttggatagatgcaata

SEQ ID NO: 820 - RNA, 21 nt, Homo sapiens
  source 1..21: mol_type = genomic RNA
tattgcatctatccaaacctt

SEQ ID NO: 821 - RNA, 22 nt, Homo sapiens
  source 1..22: mol_type = genomic RNA
ctcaagtagtctgaccagggga

SEQ ID NO: 822 - RNA, 22 nt, Homo sapiens
  source 1..22: mol_type = genomic RNA
tcccctggtcagactacttgag

SEQ ID NO: 823 - RNA, 18 nt, Homo sapiens
  source 1..18: mol_type = genomic RNA
gggtgcgggccggcgggg

SEQ ID NO: 824 - RNA, 18 nt, Homo sapiens
  source 1..18: mol_type = genomic RNA
ccccgccggcccgcaccc

SEQ ID NO: 825 - RNA, 18 nt, Homo sapiens
  source 1..18: mol_type = genomic RNA
agagcagaaggatgagat

SEQ ID NO: 826 - RNA, 18 nt, Homo sapiens
  source 1..18: mol_type = genomic RNA
atctcatccttctgctct

SEQ ID NO: 827 - RNA, 21 nt, Homo sapiens
  source 1..21: mol_type = genomic RNA
tggcaaacgtggaagccgaga

SEQ ID NO: 828 - RNA, 21 nt, Homo sapiens
  source 1..21: mol_type = genomic RNA
tctcggcttccacgtttgcca

SEQ ID NO: 829 - RNA, 18 nt, Homo sapiens
  source 1..18: mol_type = genomic RNA
ggtggggggtgttgtttt

SEQ ID NO: 830 - RNA, 18 nt, Homo sapiens
  source 1..18: mol_type = genomic RNA
aaaacaacaccccccacc

SEQ ID NO: 831 - RNA, 22 nt, Homo sapiens
  source 1..22: mol_type = genomic RNA
ctagtgctctccgttacaagta

SEQ ID NO: 832 - RNA, 22 nt, Homo sapiens
  source 1..22: mol_type = genomic RNA
tacttgtaacggagagcactag

SEQ ID NO: 833 - RNA, 22 nt, Homo sapiens
  source 1..22: mol_type = genomic RNA
caagggaccaagcattcattat

SEQ ID NO: 834 - RNA, 22 nt, Homo sapiens
  source 1..22: mol_type = genomic RNA
ataatgaatgcttggtcccttg

SEQ ID NO: 835 - RNA, 22 nt, Homo sapiens
  source 1..22: mol_type = genomic RNA
caggaaggatttagggacaggc

SEQ ID NO: 836 - RNA, 22 nt, Homo sapiens
  source 1..22: mol_type = genomic RNA
gcctgtccctaaatccttcctg

SEQ ID NO: 837 - RNA, 22 nt, Homo sapiens
  source 1..22: mol_type = genomic RNA
ctattaaggacatttgtgattc

SEQ ID NO: 838 - RNA, 22 nt, Homo sapiens
  source 1..22: mol_type = genomic RNA
gaatcacaaatgtccttaatag

SEQ ID NO: 839 - RNA, 22 nt, Homo sapiens
  source 1..22: mol_type = genomic RNA
attaaggacatttgtgattgat

SEQ ID NO: 840 - RNA, 22 nt, Homo sapiens
  source 1..22: mol_type = genomic RNA
atcaatcacaaatgtccttaat

SEQ ID NO: 841 - RNA, 17 nt, Homo sapiens
  source 1..17: mol_type = genomic RNA
gaggctgagctgaggag

SEQ ID NO: 842 - RNA, 17 nt, Homo sapiens
  source 1..17: mol_type = genomic RNA
ctcctcagctcagcctc

SEQ ID NO: 843 - RNA, 22 nt, Homo sapiens
  source 1..22: mol_type = genomic RNA
cgcgcggccgtgctcggagcag

SEQ ID NO: 844 - RNA, 22 nt, Homo sapiens
  source 1..22: mol_type = genomic RNA
ctgctccgagcacggccgcgcg

SEQ ID NO: 845 - RNA, 21 nt, Homo sapiens
  source 1..21: mol_type = genomic RNA
agccaagtggaagttacttta

SEQ ID NO: 846 - RNA, 21 nt, Homo sapiens
  source 1..21: mol_type = genomic RNA
taaagtaacttccacttggct

SEQ ID NO: 847 - RNA, 17 nt, Homo sapiens
  source 1..17: mol_type = genomic RNA
ggagtgggctggtggtt

SEQ ID NO: 848 - RNA, 17 nt, Homo sapiens
  source 1..17: mol_type = genomic RNA
aaccaccagcccactcc

SEQ ID NO: 849 - RNA, 22 nt, Homo sapiens
  source 1..22: mol_type = genomic RNA
tttctatttctcagtggggctc

SEQ ID NO: 850 - RNA, 22 nt, Homo sapiens
  source 1..22: mol_type = genomic RNA
gagccccactgagaaatagaaa

SEQ ID NO: 851 - RNA, 22 nt, Homo sapiens
  source 1..22: mol_type = genomic RNA
aacccagtgggctatggaaatg

SEQ ID NO: 852 - RNA, 22 nt, Homo sapiens
  source 1..22: mol_type = genomic RNA
catttccatagcccactgggtt

SEQ ID NO: 853 - RNA, 17 nt, Homo sapiens
  source 1..17: mol_type = genomic RNA
ggggtggtctgttgttg

SEQ ID NO: 854 - RNA, 17 nt, Homo sapiens
  source 1..17: mol_type = genomic RNA
caacaacagaccacccc

SEQ ID NO: 855 - RNA, 20 nt, Homo sapiens
  source 1..20: mol_type = genomic RNA
aaaaggcgggagaagcccca

SEQ ID NO: 856 - RNA, 20 nt, Homo sapiens
  source 1..20: mol_type = genomic RNA
tggggcttctcccgcctttt

SEQ ID NO: 857 - RNA, 20 nt, Homo sapiens
  source 1..20: mol_type = genomic RNA
taacggccgcggtaccctaa

SEQ ID NO: 858 - RNA, 20 nt, Homo sapiens
  source 1..20: mol_type = genomic RNA
ttagggtaccgcggccgtta

SEQ ID NO: 859 - RNA, 17 nt, Homo sapiens
  source 1..17: mol_type = genomic RNA
gctgggcgaggctggca

SEQ ID NO: 860 - RNA, 17 nt, Homo sapiens
  source 1..17: mol_type = genomic RNA
tgccagcctcgcccagc

SEQ ID NO: 861 - RNA, 19 nt, Homo sapiens
  source 1..19: mol_type = genomic RNA
agagctggctgaagggcag

SEQ ID NO: 862 - RNA, 19 nt, Homo sapiens
  source 1..19: mol_type = genomic RNA
ctgcccttcagccagctct

SEQ ID NO: 863 - RNA, 18 nt, Homo sapiens
  source 1..18: mol_type = genomic RNA
agggggcgggctccggcg

SEQ ID NO: 864 - RNA, 18 nt, Homo sapiens
  source 1..18: mol_type = genomic RNA
cgccggagcccgccccct

SEQ ID NO: 865 - RNA, 22 nt, Homo sapiens
  source 1..22: mol_type = genomic RNA
tctggtaagagatttgggcata

SEQ ID NO: 866 - RNA, 22 nt, Homo sapiens
  source 1..22: mol_type = genomic RNA
tatgcccaaatctcttaccaga

SEQ ID NO: 867 - RNA, 22 nt, Homo sapiens
  source 1..22: mol_type = genomic RNA
aatgtggactggtgtgaccaaa

SEQ ID NO: 868 - RNA, 22 nt, Homo sapiens
  source 1..22: mol_type = genomic RNA
tttggtcacaccagtccacatt

SEQ ID NO: 869 - RNA, 17 nt, Homo sapiens
  source 1..17: mol_type = genomic RNA
ggggctgggcgcgcgcc

SEQ ID NO: 870 - RNA, 17 nt, Homo sapiens
  source 1..17: mol_type = genomic RNA
ggcgcgcgcccagcccc

SEQ ID NO: 871 - RNA, 21 nt, Homo sapiens
  source 1..21: mol_type = genomic RNA
agaaggcctttccatctctgt

SEQ ID NO: 872 - RNA, 21 nt, Homo sapiens
  source 1..21: mol_type = genomic RNA
acagagatggaaaggccttct

SEQ ID NO: 873 - RNA, 22 nt, Homo sapiens
  source 1..22: mol_type = genomic RNA
ccagactgtggctgaccagagg

SEQ ID NO: 874 - RNA, 22 nt, Homo sapiens
  source 1..22: mol_type = genomic RNA
cctctggtcagccacagtctgg

SEQ ID NO: 875 - RNA, 21 nt, Homo sapiens
  source 1..21: mol_type = genomic RNA
aatgtaaacaggctttttgct

SEQ ID NO: 876 - RNA, 21 nt, Homo sapiens
  source 1..21: mol_type = genomic RNA
agcaaaaagcctgtttacatt

SEQ ID NO: 877 - RNA, 22 nt, Homo sapiens
  source 1..22: mol_type = genomic RNA
gaggaaactgaagctgagaggg

SEQ ID NO: 878 - RNA, 22 nt, Homo sapiens
  source 1..22: mol_type = genomic RNA
ccctctcagcttcagtttcctc

SEQ ID NO: 879 - RNA, 17 nt, Homo sapiens
  source 1..17: mol_type = genomic RNA
ctccgggacggctgggc

SEQ ID NO: 880 - RNA, 17 nt, Homo sapiens
  source 1..17: mol_type = genomic RNA
gcccagccgtcccggag

SEQ ID NO: 881 - RNA, 22 nt, Homo sapiens
  source 1..22: mol_type = genomic RNA
tgggctggcagggcaagtgctg

SEQ ID NO: 882 - RNA, 22 nt, Homo sapiens
  source 1..22: mol_type = genomic RNA
cagcacttgccctgccagccca

SEQ ID NO: 883 - RNA, 17 nt, Homo sapiens
  source 1..17: mol_type = genomic RNA
aagactgagaggaggga

SEQ ID NO: 884 - RNA, 17 nt, Homo sapiens
  source 1..17: mol_type = genomic RNA
tccctcctctcagtctt

SEQ ID NO: 885 - RNA, 17 nt, Homo sapiens
  source 1..17: mol_type = genomic RNA
tgaggtagtagtttctt

SEQ ID NO: 886 - RNA, 17 nt, Homo sapiens
  source 1..17: mol_type = genomic RNA
aagaaactactacctca

SEQ ID NO: 887 - RNA, 21 nt, Homo sapiens
  source 1..21: mol_type = genomic RNA
tatgtgacctcggatgaatca

SEQ ID NO: 888 - RNA, 21 nt, Homo sapiens
  source 1..21: mol_type = genomic RNA
tgattcatccgaggtcacata

SEQ ID NO: 889 - RNA, 22 nt, Homo sapiens
  source 1..22: mol_type = genomic RNA
gctgatgatgatggtgctgaag

SEQ ID NO: 890 - RNA, 22 nt, Homo sapiens
  source 1..22: mol_type = genomic RNA
cttcagcaccatcatcatcagc

SEQ ID NO: 891 - RNA, 22 nt, Homo sapiens
  source 1..22: mol_type = genomic RNA
tttaagcaggaaatagaattta

SEQ ID NO: 892 - RNA, 22 nt, Homo sapiens
  source 1..22: mol_type = genomic RNA
taaattctatttcctgcttaaa

SEQ ID NO: 893 - RNA, 22 nt, Homo sapiens
  source 1..22: mol_type = genomic RNA
tgtgacaatagagatgaacatg

SEQ ID NO: 894 - RNA, 22 nt, Homo sapiens
  source 1..22: mol_type = genomic RNA
catgttcatctctattgtcaca

SEQ ID NO: 895 - RNA, 18 nt, Homo sapiens
  source 1..18: mol_type = genomic RNA
aggctgggctgggacgga

SEQ ID NO: 896 - RNA, 18 nt, Homo sapiens
  source 1..18: mol_type = genomic RNA
tccgtcccagcccagcct

SEQ ID NO: 897 - RNA, 20 nt, Homo sapiens
  source 1..20: mol_type = genomic RNA
aaatgggtggtctgaggcaa

SEQ ID NO: 898 - RNA, 20 nt, Homo sapiens
  source 1..20: mol_type = genomic RNA
ttgcctcagaccacccattt

SEQ ID NO: 899 - RNA, 20 nt, Homo sapiens
  source 1..20: mol_type = genomic RNA
ctgggttgggctgggctggg

SEQ ID NO: 900 - RNA, 20 nt, Homo sapiens
  source 1..20: mol_type = genomic RNA
cccagcccagcccaacccag

SEQ ID NO: 901 - RNA, 17 nt, Homo sapiens
  source 1..17: mol_type = genomic RNA
gcggggctgggcgcgcg

SEQ ID NO: 902 - RNA, 17 nt, Homo sapiens
  source 1..17: mol_type = genomic RNA
cgcgcgcccagccccgc

SEQ ID NO: 903 - RNA, 22 nt, Homo sapiens
  source 1..22: mol_type = genomic RNA
actaaaggatatagaaggtttt

SEQ ID NO: 904 - RNA, 22 nt, Homo sapiens
  source 1..22: mol_type = genomic RNA
aaaaccttctatatcctttagt

SEQ ID NO: 905 - RNA, 22 nt, Homo sapiens
  source 1..22: mol_type = genomic RNA
tgagggagtaggatgtatggtt

SEQ ID NO: 906 - RNA, 22 nt, Homo sapiens
  source 1..22: mol_type = genomic RNA
aaccatacatcctactccctca

SEQ ID NO: 907 - RNA, 22 nt, Homo sapiens
  source 1..22: mol_type = genomic RNA
gaagaactgttgcatttgccct

SEQ ID NO: 908 - RNA, 22 nt, Homo sapiens
  source 1..22: mol_type = genomic RNA
agggcaaatgcaacagttcttc

SEQ ID NO: 909 - RNA, 22 nt, Homo sapiens
  source 1..22: mol_type = genomic RNA
cagggcctcactgtatcgccca

SEQ ID NO: 910 - RNA, 22 nt, Homo sapiens
  source 1..22: mol_type = genomic RNA
tgggcgatacagtgaggccctg

SEQ ID NO: 911 - RNA, 22 nt, Homo sapiens
  source 1..22: mol_type = genomic RNA
agactgacggctggaggcccat

SEQ ID NO: 912 - RNA, 22 nt, Homo sapiens
  source 1..22: mol_type = genomic RNA
atgggcctccagccgtcagtct

SEQ ID NO: 913 - RNA, 18 nt, Homo sapiens
  source 1..18: mol_type = genomic RNA
acaggcaggattggggaa

SEQ ID NO: 914 - RNA, 18 nt, Homo sapiens
  source 1..18: mol_type = genomic RNA
ttccccaatcctgcctgt

SEQ ID NO: 915 - RNA, 22 nt, Homo sapiens
  source 1..22: mol_type = genomic RNA
aggactggactcccggcagccc

SEQ ID NO: 916 - RNA, 22 nt, Homo sapiens
  source 1..22: mol_type = genomic RNA
gggctgccgggagtccagtcct

SEQ ID NO: 917 - RNA, 17 nt, Homo sapiens
  source 1..17: mol_type = genomic RNA
gggagaagggtcggggc

SEQ ID NO: 918 - RNA, 17 nt, Homo sapiens
  source 1..17: mol_type = genomic RNA
gccccgacccttctccc

SEQ ID NO: 919 - RNA, 25 nt, Homo sapiens
  source 1..25: mol_type = genomic RNA
aaatatgatgaaactcacagctgag

SEQ ID NO: 920 - RNA, 25 nt, Homo sapiens
  source 1..25: mol_type = genomic RNA
ctcagctgtgagtttcatcatattt

SEQ ID NO: 921 - RNA, 26 nt, Homo sapiens
  source 1..26: mol_type = genomic RNA
gctcagggatgataactgtgctgaga

SEQ ID NO: 922 - RNA, 26 nt, Homo sapiens
  source 1..26: mol_type = genomic RNA
tctcagcacagttatcatccctgagc

SEQ ID NO: 923 - RNA, 18 nt, Homo sapiens
  source 1..18: mol_type = genomic RNA
cagcagtgcgcagggctg

SEQ ID NO: 924 - RNA, 18 nt, Homo sapiens
  source 1..18: mol_type = genomic RNA
cagccctgcgcactgctg

SEQ ID NO: 925 - RNA, 22 nt, Homo sapiens
  source 1..22: mol_type = genomic RNA
gctaaggaagtcctgtgctcag

SEQ ID NO: 926 - RNA, 22 nt, Homo sapiens
  source 1..22: mol_type = genomic RNA
ctgagcacaggacttccttagc

SEQ ID NO: 927 - RNA, 21 nt, Homo sapiens
  source 1..21: mol_type = genomic RNA
tgactctgcctgtaggccggt

SEQ ID NO: 928 - RNA, 21 nt, Homo sapiens
  source 1..21: mol_type = genomic RNA
accggcctacaggcagagtca

SEQ ID NO: 929 - RNA, 21 nt, Homo sapiens
  source 1..21: mol_type = genomic RNA
gaccgagagggcctcggctgt

SEQ ID NO: 930 - RNA, 21 nt, Homo sapiens
  source 1..21: mol_type = genomic RNA
acagccgaggccctctcggtc

SEQ ID NO: 931 - RNA, 21 nt, Homo sapiens
  source 1..21: mol_type = genomic RNA
ggggggatgtgcatgctggtt

SEQ ID NO: 932 - RNA, 21 nt, Homo sapiens
  source 1..21: mol_type = genomic RNA
aaccagcatgcacatcccccc

SEQ ID NO: 933 - RNA, 22 nt, Homo sapiens
  source 1..22: mol_type = genomic RNA
tggtctgcaaagagatgactgt

SEQ ID NO: 934 - RNA, 22 nt, Homo sapiens
  source 1..22: mol_type = genomic RNA
acagtcatctctttgcagacca

SEQ ID NO: 935 - RNA, 22 nt, Homo sapiens
  source 1..22: mol_type = genomic RNA
tcattatatgtatgatctggac

SEQ ID NO: 936 - RNA, 22 nt, Homo sapiens
  source 1..22: mol_type = genomic RNA
gtccagatcatacatataatga

SEQ ID NO: 937 - RNA, 18 nt, Homo sapiens
  source 1..18: mol_type = genomic RNA
cccagcaggacgggagcg

SEQ ID NO: 938 - RNA, 18 nt, Homo sapiens
  source 1..18: mol_type = genomic RNA
cgctcccgtcctgctggg

SEQ ID NO: 939 - RNA, 17 nt, Homo sapiens
  source 1..17: mol_type = genomic RNA
atggagaaggcttctga

SEQ ID NO: 940 - RNA, 17 nt, Homo sapiens
  source 1..17: mol_type = genomic RNA
tcagaagccttctccat

SEQ ID NO: 941 - RNA, 17 nt, Homo sapiens
  source 1..17: mol_type = genomic RNA
ccccggggagcccggcg

SEQ ID NO: 942 - RNA, 17 nt, Homo sapiens
  source 1..17: mol_type = genomic RNA
cgccgggctccccgggg

SEQ ID NO: 943 - RNA, 22 nt, Homo sapiens
  source 1..22: mol_type = genomic RNA
tggaaggaggttgccggacgct

SEQ ID NO: 944 - RNA, 22 nt, Homo sapiens
  source 1..22: mol_type = genomic RNA
agcgtccggcaacctccttcca

SEQ ID NO: 945 - RNA, 17 nt, Homo sapiens
  source 1..17: mol_type = genomic RNA
ggatggaggaggggtct

SEQ ID NO: 946 - RNA, 17 nt, Homo sapiens
  source 1..17: mol_type = genomic RNA
agacccctcctccatcc

SEQ ID NO: 947 - RNA, 17 nt, Homo sapiens
  source 1..17: mol_type = genomic RNA
gtggacctggctgggac

SEQ ID NO: 948 - RNA, 17 nt, Homo sapiens
  source 1..17: mol_type = genomic RNA
gtcccagccaggtccac

SEQ ID NO: 949 - RNA, 21 nt, Homo sapiens
  source 1..21: mol_type = genomic RNA
tcgtgcatatatctaccacat

SEQ ID NO: 950 - RNA, 21 nt, Homo sapiens
  source 1..21: mol_type = genomic RNA
atgtggtagatatatgcacga

SEQ ID NO: 951 - RNA, 21 nt, Homo sapiens
  source 1..21: mol_type = genomic RNA
tgtggtagatatatgcacgat

SEQ ID NO: 952 - RNA, 21 nt, Homo sapiens
  source 1..21: mol_type = genomic RNA
atcgtgcatatatctaccaca

SEQ ID NO: 953 - RNA, 22 nt, Homo sapiens
  source 1..22: mol_type = genomic RNA
tgagccgagctgagcttagctg

SEQ ID NO: 954 - RNA, 22 nt, Homo sapiens
  source 1..22: mol_type = genomic RNA
cagctaagctcagctcggctca

SEQ ID NO: 955 - RNA, 22 nt, Homo sapiens
  source 1..22: mol_type = genomic RNA
gagcttggatgagctgggctga

SEQ ID NO: 956 - RNA, 22 nt, Homo sapiens
  source 1..22: mol_type = genomic RNA
tcagcccagctcatccaagctc

SEQ ID NO: 957 - RNA, 22 nt, Homo sapiens
  source 1..22: mol_type = genomic RNA
gctgaactgggctgagctgggc

SEQ ID NO: 958 - RNA, 22 nt, Homo sapiens
  source 1..22: mol_type = genomic RNA
gcccagctcagcccagttcagc

SEQ ID NO: 959 - RNA, 21 nt, Homo sapiens
  source 1..21: mol_type = genomic RNA
ttagtcctgcctgtaggttta

SEQ ID NO: 960 - RNA, 21 nt, Homo sapiens
  source 1..21: mol_type = genomic RNA
taaacctacaggcaggactaa

SEQ ID NO: 961 - RNA, 20 nt, Homo sapiens
  source 1..20: mol_type = genomic RNA
ttgggctgggctgggttggg

SEQ ID NO: 962 - RNA, 20 nt, Homo sapiens
  source 1..20: mol_type = genomic RNA
cccaacccagcccagcccaa

SEQ ID NO: 963 - RNA, 20 nt, Homo sapiens
  source 1..20: mol_type = genomic RNA
taggatgggggtgagaggtg

SEQ ID NO: 964 - RNA, 20 nt, Homo sapiens
  source 1..20: mol_type = genomic RNA
cacctctcacccccatccta

SEQ ID NO: 965 - RNA, 22 nt, Homo sapiens
  source 1..22: mol_type = genomic RNA
aaaagtaattgtggattttgct

SEQ ID NO: 966 - RNA, 22 nt, Homo sapiens
  source 1..22: mol_type = genomic RNA
agcaaaatccacaattactttt

SEQ ID NO: 967 - RNA, 22 nt, Homo sapiens
  source 1..22: mol_type = genomic RNA
caaaaaccggcaattacttttg

SEQ ID NO: 968 - RNA, 22 nt, Homo sapiens
  source 1..22: mol_type = genomic RNA
caaaagtaattgccggtttttg

SEQ ID NO: 969 - RNA, 22 nt, Homo sapiens
  source 1..22: mol_type = genomic RNA
gaaaacgacaatgacttttgca

SEQ ID NO: 970 - RNA, 22 nt, Homo sapiens
  source 1..22: mol_type = genomic RNA
tgcaaaagtcattgtcgttttc

SEQ ID NO: 971 - RNA, 21 nt, Homo sapiens
  source 1..21: mol_type = genomic RNA
caaaaactgcaattactttca

SEQ ID NO: 972 - RNA, 21 nt, Homo sapiens
  source 1..21: mol_type = genomic RNA
tgaaagtaattgcagtttttg

SEQ ID NO: 973 - RNA, 21 nt, Homo sapiens
  source 1..21: mol_type = genomic RNA
aaaggtaattgtggtttctgc

SEQ ID NO: 974 - RNA, 21 nt, Homo sapiens
  source 1..21: mol_type = genomic RNA
gcagaaaccacaattaccttt

SEQ ID NO: 975 - RNA, 22 nt, Homo sapiens
  source 1..22: mol_type = genomic RNA
caaaaactgcagttacttttgc

SEQ ID NO: 976 - RNA, 22 nt, Homo sapiens
  source 1..22: mol_type = genomic RNA
gcaaaagtaactgcagtttttg

SEQ ID NO: 977 - RNA, 20 nt, Homo sapiens
  source 1..20: mol_type = genomic RNA
aaaagtgattgcagtgtttg

SEQ ID NO: 978 - RNA, 20 nt, Homo sapiens
  source 1..20: mol_type = genomic RNA
caaacactgcaatcactttt

SEQ ID NO: 979 - RNA, 22 nt, Homo sapiens
  source 1..22: mol_type = genomic RNA
aaaggtaattgcagtttttccc

SEQ ID NO: 980 - RNA, 22 nt, Homo sapiens
  source 1..22: mol_type = genomic RNA
gggaaaaactgcaattaccttt

SEQ ID NO: 981 - RNA, 21 nt, Homo sapiens
  source 1..21: mol_type = genomic RNA
taaaaactgcaattactttta

SEQ ID NO: 982 - RNA, 21 nt, Homo sapiens
  source 1..21: mol_type = genomic RNA
taaaagtaattgcagttttta

SEQ ID NO: 983 - RNA, 23 nt, Homo sapiens
  source 1..23: mol_type = genomic RNA
tgcaaaagtaattgcagtttttg

SEQ ID NO: 984 - RNA, 23 nt, Homo sapiens
  source 1..23: mol_type = genomic RNA
caaaaactgcaattacttttgca

SEQ ID NO: 985 - RNA, 21 nt, Homo sapiens
  source 1..21: mol_type = genomic RNA
aaaagtaactgcggtttttga

SEQ ID NO: 986 - RNA, 21 nt, Homo sapiens
  source 1..21: mol_type = genomic RNA
tcaaaaaccgcagttactttt

SEQ ID NO: 987 - RNA, 22 nt, Homo sapiens
  source 1..22: mol_type = genomic RNA
aacggcaatgacttttgtacca

SEQ ID NO: 988 - RNA, 22 nt, Homo sapiens
  source 1..22: mol_type = genomic RNA
tggtacaaaagtcattgccgtt

SEQ ID NO: 989 - RNA, 22 nt, Homo sapiens
  source 1..22: mol_type = genomic RNA
caaaaactgcagttacttttgt

SEQ ID NO: 990 - RNA, 22 nt, Homo sapiens
  source 1..22: mol_type = genomic RNA
acaaaagtaactgcagtttttg

SEQ ID NO: 991 - RNA, 22 nt, Homo sapiens
  source 1..22: mol_type = genomic RNA
aaaagtaattgcggtttttgcc

SEQ ID NO: 992 - RNA, 22 nt, Homo sapiens
  source 1..22: mol_type = genomic RNA
ggcaaaaaccgcaattactttt

SEQ ID NO: 993 - RNA, 20 nt, Homo sapiens
  source 1..20: mol_type = genomic RNA
aaaaggcattgtggtttttg

SEQ ID NO: 994 - RNA, 20 nt, Homo sapiens
  source 1..20: mol_type = genomic RNA
caaaaaccacaatgcctttt

SEQ ID NO: 995 - RNA, 23 nt, Homo sapiens
  source 1..23: mol_type = genomic RNA
cggcccgggctgctgctgttcct

SEQ ID NO: 996 - RNA, 23 nt, Homo sapiens
  source 1..23: mol_type = genomic RNA
aggaacagcagcagcccgggccg

SEQ ID NO: 997 - RNA, 20 nt, Homo sapiens
  source 1..20: mol_type = genomic RNA
agaggtatagggcatgggaa

SEQ ID NO: 998 - RNA, 20 nt, Homo sapiens
  source 1..20: mol_type = genomic RNA
ttcccatgccctatacctct

SEQ ID NO: 999 - RNA, 22 nt, Homo sapiens
  source 1..22: mol_type = genomic RNA
ttcctatgcatatacttctttg

SEQ ID NO: 1000 - RNA, 22 nt, Homo sapiens
  source 1..22: mol_type = genomic RNA
caaagaagtatatgcataggaa

SEQ ID NO: 1001 - RNA, 22 nt, Homo sapiens
  source 1..22: mol_type = genomic RNA
atcatagaggaaaatccatgtt

SEQ ID NO: 1002 - RNA, 22 nt, Homo sapiens
  source 1..22: mol_type = genomic RNA
aacatggattttcctctatgat

SEQ ID NO: 1003 - RNA, 22 nt, Homo sapiens
  source 1..22: mol_type = genomic RNA
cgtggatattccttctatgttt

SEQ ID NO: 1004 - RNA, 22 nt, Homo sapiens
  source 1..22: mol_type = genomic RNA
aaacatagaaggaatatccacg

SEQ ID NO: 1005 - RNA, 22 nt, Homo sapiens
  source 1..22: mol_type = genomic RNA
tgagtattacatggccaatctc

SEQ ID NO: 1006 - RNA, 22 nt, Homo sapiens
  source 1..22: mol_type = genomic RNA
gagattggccatgtaatactca

SEQ ID NO: 1007 - RNA, 21 nt, Homo sapiens
  source 1..21: mol_type = genomic RNA
cttccgccccgccgggcgtcg

SEQ ID NO: 1008 - RNA, 21 nt, Homo sapiens
  source 1..21: mol_type = genomic RNA
cgacgcccggcggggcggaag

SEQ ID NO: 1009 - RNA, 22 nt, Homo sapiens
  source 1..22: mol_type = genomic RNA
tagcttatcagactgatgttga

SEQ ID NO: 1010 - RNA, 22 nt, Homo sapiens
  source 1..22: mol_type = genomic RNA
tcaacatcagtctgataagcta

SEQ ID NO: 1011 - RNA, 22 nt, Homo sapiens
  source 1..22: mol_type = genomic RNA
cactagattgtgagctcctgga

SEQ ID NO: 1012 - RNA, 22 nt, Homo sapiens
  source 1..22: mol_type = genomic RNA
tccaggagctcacaatctagtg

SEQ ID NO: 1013 - RNA, 22 nt, Homo sapiens
  source 1..22: mol_type = genomic RNA
aaggagctcacagtctattgag

SEQ ID NO: 1014 - RNA, 22 nt, Homo sapiens
  source 1..22: mol_type = genomic RNA
ctcaatagactgtgagctcctt

SEQ ID NO: 1015 - RNA, 22 nt, Homo sapiens
  source 1..22: mol_type = genomic RNA
tacgtcatcgttgtcatcgtca

SEQ ID NO: 1016 - RNA, 22 nt, Homo sapiens
  source 1..22: mol_type = genomic RNA
tgacgatgacaacgatgacgta

SEQ ID NO: 1017 - RNA, 22 nt, Homo sapiens
  source 1..22: mol_type = genomic RNA
cacgctcatgcacacacccaca

SEQ ID NO: 1018 - RNA, 22 nt, Homo sapiens
  source 1..22: mol_type = genomic RNA
tgtgggtgtgtgcatgagcgtg

SEQ ID NO: 1019 - RNA, 21 nt, Homo sapiens
  source 1..21: mol_type = genomic RNA
caacaccagtcgatgggctgt

SEQ ID NO: 1020 - RNA, 21 nt, Homo sapiens
  source 1..21: mol_type = genomic RNA
acagcccatcgactggtgttg

SEQ ID NO: 1021 - RNA, 22 nt, Homo sapiens
  source 1..22: mol_type = genomic RNA
ttcaccaccttctccacccagc

SEQ ID NO: 1022 - RNA, 22 nt, Homo sapiens
  source 1..22: mol_type = genomic RNA
gctgggtggagaaggtggtgaa

SEQ ID NO: 1023 - RNA, 23 nt, Homo sapiens
  source 1..23: mol_type = genomic RNA
cgggtagagagggcagtgggagg

SEQ ID NO: 1024 - RNA, 23 nt, Homo sapiens
  source 1..23: mol_type = genomic RNA
cctcccactgccctctctacccg

SEQ ID NO: 1025 - RNA, 18 nt, Homo sapiens
  source 1..18: mol_type = genomic RNA
aatccttgctacctgggt

SEQ ID NO: 1026 - RNA, 18 nt, Homo sapiens
  source 1..18: mol_type = genomic RNA
acccaggtagcaaggatt

SEQ ID NO: 1027 - RNA, 22 nt, Homo sapiens
  source 1..22: mol_type = genomic RNA
caatttagtgtgtgtgatattt

SEQ ID NO: 1028 - RNA, 22 nt, Homo sapiens
  source 1..22: mol_type = genomic RNA
aaatatcacacacactaaattg

SEQ ID NO: 1029 - RNA, 22 nt, Homo sapiens
  source 1..22: mol_type = genomic RNA
tattgcacattactaagttgca

SEQ ID NO: 1030 - RNA, 22 nt, Homo sapiens
  source 1..22: mol_type = genomic RNA
tgcaacttagtaatgtgcaata

SEQ ID NO: 1031 - RNA, 22 nt, Homo sapiens
  source 1..22: mol_type = genomic RNA
cctattcttgattacttgtttc

SEQ ID NO: 1032 - RNA, 22 nt, Homo sapiens
  source 1..22: mol_type = genomic RNA
gaaacaagtaatcaagaatagg

SEQ ID NO: 1033 - RNA, 22 nt, Homo sapiens
  source 1..22: mol_type = genomic RNA
ttcaagtaatccaggataggct

SEQ ID NO: 1034 - RNA, 22 nt, Homo sapiens
  source 1..22: mol_type = genomic RNA
agcctatcctggattacttgaa

SEQ ID NO: 1035 - RNA, 23 nt, Homo sapiens
  source 1..23: mol_type = genomic RNA
ccagttaccgcttccgctaccgc

SEQ ID NO: 1036 - RNA, 23 nt, Homo sapiens
  source 1..23: mol_type = genomic RNA
gcggtagcggaagcggtaactgg

SEQ ID NO: 1037 - RNA, 21 nt, Homo sapiens
  source 1..21: mol_type = genomic RNA
gatttcagtggagtgaagttc

SEQ ID NO: 1038 - RNA, 21 nt, Homo sapiens
  source 1..21: mol_type = genomic RNA
gaacttcactccactgaaatc

SEQ ID NO: 1039 - RNA, 22 nt, Homo sapiens
  source 1..22: mol_type = genomic RNA
tccttcattccaccggagtctg

SEQ ID NO: 1040 - RNA, 22 nt, Homo sapiens
  source 1..22: mol_type = genomic RNA
cagactccggtggaatgaagga

SEQ ID NO: 1041 - RNA, 23 nt, Homo sapiens
  source 1..23: mol_type = genomic RNA
aaaatggtgccctagtgactaca

SEQ ID NO: 1042 - RNA, 23 nt, Homo sapiens
  source 1..23: mol_type = genomic RNA
tgtagtcactagggcaccatttt

SEQ ID NO: 1043 - RNA, 21 nt, Homo sapiens
  source 1..21: mol_type = genomic RNA
caagtcactagtggttccgtt

SEQ ID NO: 1044 - RNA, 21 nt, Homo sapiens
  source 1..21: mol_type = genomic RNA
aacggaaccactagtgacttg

SEQ ID NO: 1045 - RNA, 22 nt, Homo sapiens
  source 1..22: mol_type = genomic RNA
ccagtattaactgtgctgctga

SEQ ID NO: 1046 - RNA, 22 nt, Homo sapiens
  source 1..22: mol_type = genomic RNA
tcagcagcacagttaatactgg

SEQ ID NO: 1047 - RNA, 23 nt, Homo sapiens
  source 1..23: mol_type = genomic RNA
tcccccaggtgtgattctgattt

SEQ ID NO: 1048 - RNA, 23 nt, Homo sapiens
  source 1..23: mol_type = genomic RNA
aaatcagaatcacacctggggga

SEQ ID NO: 1049 - RNA, 22 nt, Homo sapiens
  source 1..22: mol_type = genomic RNA
aaaagctgggttgagagggcga

SEQ ID NO: 1050 - RNA, 22 nt, Homo sapiens
  source 1..22: mol_type = genomic RNA
tcgccctctcaacccagctttt

SEQ ID NO: 1051 - RNA, 22 nt, Homo sapiens
  source 1..22: mol_type = genomic RNA
tggacggagaactgataagggt

SEQ ID NO: 1052 - RNA, 22 nt, Homo sapiens
  source 1..22: mol_type = genomic RNA
acccttatcagttctccgtcca

SEQ ID NO: 1053 - RNA, 22 nt, Homo sapiens
  source 1..22: mol_type = genomic RNA
tggtgggccgcagaacatgtgc

SEQ ID NO: 1054 - RNA, 22 nt, Homo sapiens
  source 1..22: mol_type = genomic RNA
gcacatgttctgcggcccacca

SEQ ID NO: 1055 - RNA, 22 nt, Homo sapiens
  source 1..22: mol_type = genomic RNA
agtgcctgctatgtgccaggca

SEQ ID NO: 1056 - RNA, 22 nt, Homo sapiens
  source 1..22: mol_type = genomic RNA
tgcctggcacatagcaggcact

SEQ ID NO: 1057 - RNA, 22 nt, Homo sapiens
  source 1..22: mol_type = genomic RNA
cttggcacctagcaagcactca

SEQ ID NO: 1058 - RNA, 22 nt, Homo sapiens
  source 1..22: mol_type = genomic RNA
tgagtgcttgctaggtgccaag

SEQ ID NO: 1059 - RNA, 23 nt, Homo sapiens
  source 1..23: mol_type = genomic RNA
ttattgcttaagaatacgcgtag

SEQ ID NO: 1060 - RNA, 23 nt, Homo sapiens
  source 1..23: mol_type = genomic RNA
ctacgcgtattcttaagcaataa

SEQ ID NO: 1061 - RNA, 22 nt, Homo sapiens
  source 1..22: mol_type = genomic RNA
ttgcatagtcacaaaagtgatc

SEQ ID NO: 1062 - RNA, 22 nt, Homo sapiens
  source 1..22: mol_type = genomic RNA
gatcacttttgtgactatgcaa

SEQ ID NO: 1063 - RNA, 22 nt, Homo sapiens
  source 1..22: mol_type = genomic RNA
gtgaattaccgaagggccataa

SEQ ID NO: 1064 - RNA, 22 nt, Homo sapiens
  source 1..22: mol_type = genomic RNA
ttatggcccttcggtaattcac

SEQ ID NO: 1065 - RNA, 22 nt, Homo sapiens
  source 1..22: mol_type = genomic RNA
tatggcactggtagaattcact

SEQ ID NO: 1066 - RNA, 22 nt, Homo sapiens
  source 1..22: mol_type = genomic RNA
agtgaattctaccagtgccata

SEQ ID NO: 1067 - RNA, 22 nt, Homo sapiens
  source 1..22: mol_type = genomic RNA
tgatatgtttgatatattaggt

SEQ ID NO: 1068 - RNA, 22 nt, Homo sapiens
  source 1..22: mol_type = genomic RNA
acctaatatatcaaacatatca

SEQ ID NO: 1069 - RNA, 21 nt, Homo sapiens
  source 1..21: mol_type = genomic RNA
tgatatgtttgatattgggtt

SEQ ID NO: 1070 - RNA, 21 nt, Homo sapiens
  source 1..21: mol_type = genomic RNA
aacccaatatcaaacatatca

SEQ ID NO: 1071 - RNA, 18 nt, Homo sapiens
  source 1..18: mol_type = genomic RNA
agcaggtgcggggcggcg

SEQ ID NO: 1072 - RNA, 18 nt, Homo sapiens
  source 1..18: mol_type = genomic RNA
cgccgccccgcacctgct

SEQ ID NO: 1073 - RNA, 21 nt, Homo sapiens
  source 1..21: mol_type = genomic RNA
cagtgcaagtgtagatgccga

SEQ ID NO: 1074 - RNA, 21 nt, Homo sapiens
  source 1..21: mol_type = genomic RNA
tcggcatctacacttgcactg

SEQ ID NO: 1075 - RNA, 22 nt, Homo sapiens
  source 1..22: mol_type = genomic RNA
tatgtaatatggtccacatctt

SEQ ID NO: 1076 - RNA, 22 nt, Homo sapiens
  source 1..22: mol_type = genomic RNA
aagatgtggaccatattacata

SEQ ID NO: 1077 - RNA, 21 nt, Homo sapiens
  source 1..21: mol_type = genomic RNA
aatataacacagatggcctgt

SEQ ID NO: 1078 - RNA, 21 nt, Homo sapiens
  source 1..21: mol_type = genomic RNA
acaggccatctgtgttatatt

SEQ ID NO: 1079 - RNA, 22 nt, Homo sapiens
  source 1..22: mol_type = genomic RNA
atcgggaatgtcgtgtccgccc

SEQ ID NO: 1080 - RNA, 22 nt, Homo sapiens
  source 1..22: mol_type = genomic RNA
gggcggacacgacattcccgat

SEQ ID NO: 1081 - RNA, 23 nt, Homo sapiens
  source 1..23: mol_type = genomic RNA
aatgacacgatcactcccgttga

SEQ ID NO: 1082 - RNA, 23 nt, Homo sapiens
  source 1..23: mol_type = genomic RNA
tcaacgggagtgatcgtgtcatt

SEQ ID NO: 1083 - RNA, 22 nt, Homo sapiens
  source 1..22: mol_type = genomic RNA
tactcaggagagtggcaatcac

SEQ ID NO: 1084 - RNA, 22 nt, Homo sapiens
  source 1..22: mol_type = genomic RNA
gtgattgccactctcctgagta

SEQ ID NO: 1085 - RNA, 23 nt, Homo sapiens
  source 1..23: mol_type = genomic RNA
tggaagactagtgattttgttgt

SEQ ID NO: 1086 - RNA, 23 nt, Homo sapiens
  source 1..23: mol_type = genomic RNA
acaacaaaatcactagtcttcca

SEQ ID NO: 1087 - RNA, 22 nt, Homo sapiens
  source 1..22: mol_type = genomic RNA
ataaagctagataaccgaaagt

SEQ ID NO: 1088 - RNA, 22 nt, Homo sapiens
  source 1..22: mol_type = genomic RNA
actttcggttatctagctttat

SEQ ID NO: 1089 - RNA, 23 nt, Homo sapiens
  source 1..23: mol_type = genomic RNA
tctttggttatctagctgtatga

SEQ ID NO: 1090 - RNA, 23 nt, Homo sapiens
  source 1..23: mol_type = genomic RNA
tcatacagctagataaccaaaga

SEQ ID NO: 1091 - RNA, 22 nt, Homo sapiens
  source 1..22: mol_type = genomic RNA
acaggtgaggttcttgggagcc

SEQ ID NO: 1092 - RNA, 22 nt, Homo sapiens
  source 1..22: mol_type = genomic RNA
ggctcccaagaacctcacctgt

SEQ ID NO: 1093 - RNA, 24 nt, Homo sapiens
  source 1..24: mol_type = genomic RNA
tccctgagaccctttaacctgtga

SEQ ID NO: 1094 - RNA, 24 nt, Homo sapiens
  source 1..24: mol_type = genomic RNA
tcacaggttaaagggtctcaggga

SEQ ID NO: 1095 - RNA, 22 nt, Homo sapiens
  source 1..22: mol_type = genomic RNA
caacaaatcccagtctacctaa

SEQ ID NO: 1096 - RNA, 22 nt, Homo sapiens
  source 1..22: mol_type = genomic RNA
ttaggtagactgggatttgttg

SEQ ID NO: 1097 - RNA, 22 nt, Homo sapiens
  source 1..22: mol_type = genomic RNA
cgtgttcacagcggaccttgat

SEQ ID NO: 1098 - RNA, 22 nt, Homo sapiens
  source 1..22: mol_type = genomic RNA
atcaaggtccgctgtgaacacg

SEQ ID NO: 1099 - RNA, 20 nt, Homo sapiens
  source 1..20: mol_type = genomic RNA
taaggcacgcggtgaatgcc

SEQ ID NO: 1100 - RNA, 20 nt, Homo sapiens
  source 1..20: mol_type = genomic RNA
ggcattcaccgcgtgcctta

SEQ ID NO: 1101 - RNA, 22 nt, Homo sapiens
  source 1..22: mol_type = genomic RNA
aacacacctggttaacctcttt

SEQ ID NO: 1102 - RNA, 22 nt, Homo sapiens
  source 1..22: mol_type = genomic RNA
aaagaggttaaccaggtgtgtt

SEQ ID NO: 1103 - RNA, 22 nt, Homo sapiens
  source 1..22: mol_type = genomic RNA
taacagtctacagccatggtcg

SEQ ID NO: 1104 - RNA, 22 nt, Homo sapiens
  source 1..22: mol_type = genomic RNA
cgaccatggctgtagactgtta

SEQ ID NO: 1105 - RNA, 22 nt, Homo sapiens
  source 1..22: mol_type = genomic RNA
accgtggctttcgattgttact

SEQ ID NO: 1106 - RNA, 22 nt, Homo sapiens
  source 1..22: mol_type = genomic RNA
agtaacaatcgaaagccacggt

SEQ ID NO: 1107 - RNA, 21 nt, Homo sapiens
  source 1..21: mol_type = genomic RNA
taacagtctccagtcacggcc

SEQ ID NO: 1108 - RNA, 21 nt, Homo sapiens
  source 1..21: mol_type = genomic RNA
ggccgtgactggagactgtta

SEQ ID NO: 1109 - RNA, 23 nt, Homo sapiens
  source 1..23: mol_type = genomic RNA
accttggctctagactgcttact

SEQ ID NO: 1110 - RNA, 23 nt, Homo sapiens
  source 1..23: mol_type = genomic RNA
agtaagcagtctagagccaaggt

SEQ ID NO: 1111 - RNA, 23 nt, Homo sapiens
  source 1..23: mol_type = genomic RNA
tctcacacagaaatcgcacccgt

SEQ ID NO: 1112 - RNA, 23 nt, Homo sapiens
  source 1..23: mol_type = genomic RNA
acgggtgcgatttctgtgtgaga

SEQ ID NO: 1113 - RNA, 22 nt, Homo sapiens
  source 1..22: mol_type = genomic RNA
tggttgaccatagaacatgcgc

SEQ ID NO: 1114 - RNA, 22 nt, Homo sapiens
  source 1..22: mol_type = genomic RNA
gcgcatgttctatggtcaacca

SEQ ID NO: 1115 - RNA, 23 nt, Homo sapiens
  source 1..23: mol_type = genomic RNA
cagtaacaaagattcatccttgt

SEQ ID NO: 1116 - RNA, 23 nt, Homo sapiens
  source 1..23: mol_type = genomic RNA
acaaggatgaatctttgttactg

SEQ ID NO: 1117 - RNA, 22 nt, Homo sapiens
  source 1..22: mol_type = genomic RNA
agagttgagtctggacgtcccg

SEQ ID NO: 1118 - RNA, 22 nt, Homo sapiens
  source 1..22: mol_type = genomic RNA
cgggacgtccagactcaactct

SEQ ID NO: 1119 - RNA, 22 nt, Homo sapiens
  source 1..22: mol_type = genomic RNA
agaattgtggctggacatctgt

SEQ ID NO: 1120 - RNA, 22 nt, Homo sapiens
  source 1..22: mol_type = genomic RNA
acagatgtccagccacaattct

SEQ ID NO: 1121 - RNA, 21 nt, Homo sapiens
  source 1..21: mol_type = genomic RNA
tgattgtccaaacgcaattct

SEQ ID NO: 1122 - RNA, 21 nt, Homo sapiens
  source 1..21: mol_type = genomic RNA
agaattgcgtttggacaatca

SEQ ID NO: 1123 - RNA, 22 nt, Homo sapiens
  source 1..22: mol_type = genomic RNA
tatagggattggagccgtggcg

SEQ ID NO: 1124 - RNA, 22 nt, Homo sapiens
  source 1..22: mol_type = genomic RNA
cgccacggctccaatccctata

SEQ ID NO: 1125 - RNA, 23 nt, Homo sapiens
  source 1..23: mol_type = genomic RNA
tatggctttttattcctatgtga

SEQ ID NO: 1126 - RNA, 23 nt, Homo sapiens
  source 1..23: mol_type = genomic RNA
tcacataggaataaaaagccata

SEQ ID NO: 1127 - RNA, 22 nt, Homo sapiens
  source 1..22: mol_type = genomic RNA
atgtagggctaaaagccatggg

SEQ ID NO: 1128 - RNA, 22 nt, Homo sapiens
  source 1..22: mol_type = genomic RNA
cccatggcttttagccctacat

SEQ ID NO: 1129 - RNA, 23 nt, Homo sapiens
  source 1..23: mol_type = genomic RNA
tatggcttttcattcctatgtga

SEQ ID NO: 1130 - RNA, 23 nt, Homo sapiens
  source 1..23: mol_type = genomic RNA
tcacataggaatgaaaagccata

SEQ ID NO: 1131 - RNA, 22 nt, Homo sapiens
  source 1..22: mol_type = genomic RNA
aaccatcgaccgttgagtggac

SEQ ID NO: 1132 - RNA, 22 nt, Homo sapiens
  source 1..22: mol_type = genomic RNA
gtccactcaacggtcgatggtt

SEQ ID NO: 1133 - RNA, 22 nt, Homo sapiens
  source 1..22: mol_type = genomic RNA
aacattcaacctgtcggtgagt

SEQ ID NO: 1134 - RNA, 22 nt, Homo sapiens
  source 1..22: mol_type = genomic RNA
actcaccgacaggttgaatgtt

SEQ ID NO: 1135 - RNA, 25 nt, Homo sapiens
  source 1..25: mol_type = genomic RNA
cttccagacgctccgccccacgtcg

SEQ ID NO: 1136 - RNA, 25 nt, Homo sapiens
  source 1..25: mol_type = genomic RNA
cgacgtggggcggagcgtctggaag

SEQ ID NO: 1137 - RNA, 24 nt, Homo sapiens
  source 1..24: mol_type = genomic RNA
aacaacaaaatcactagtcttcca

SEQ ID NO: 1138 - RNA, 24 nt, Homo sapiens
  source 1..24: mol_type = genomic RNA
tggaagactagtgattttgttgtt

SEQ ID NO: 1139 - RNA, 22 nt, Homo sapiens
  source 1..22: mol_type = genomic RNA
aggtagactgggatttgttgtt

SEQ ID NO: 1140 - RNA, 22 nt, Homo sapiens
  source 1..22: mol_type = genomic RNA
aacaacaaatcccagtctacct

SEQ ID NO: 1141 - RNA, 22 nt, Homo sapiens
  source 1..22: mol_type = genomic RNA
aaacaccattgtcacactccac

SEQ ID NO: 1142 - RNA, 22 nt, Homo sapiens
  source 1..22: mol_type = genomic RNA
gtggagtgtgacaatggtgttt

SEQ ID NO: 1143 - RNA, 23 nt, Homo sapiens
  source 1..23: mol_type = genomic RNA
tttagtgtgataatggcgtttga

SEQ ID NO: 1144 - RNA, 23 nt, Homo sapiens
  source 1..23: mol_type = genomic RNA
tcaaacgccattatcacactaaa

SEQ ID NO: 1145 - RNA, 22 nt, Homo sapiens
  source 1..22: mol_type = genomic RNA
tatggaaagactttgccactct

SEQ ID NO: 1146 - RNA, 22 nt, Homo sapiens
  source 1..22: mol_type = genomic RNA
agagtggcaaagtctttccata

SEQ ID NO: 1147 - RNA, 21 nt, Homo sapiens
  source 1..21: mol_type = genomic RNA
agtggcaaagtctttccatat

SEQ ID NO: 1148 - RNA, 21 nt, Homo sapiens
  source 1..21: mol_type = genomic RNA
atatggaaagactttgccact

SEQ ID NO: 1149 - RNA, 22 nt, Homo sapiens
  source 1..22: mol_type = genomic RNA
cagcccggatcccagcccactt

SEQ ID NO: 1150 - RNA, 22 nt, Homo sapiens
  source 1..22: mol_type = genomic RNA
aagtgggctgggatccgggctg

SEQ ID NO: 1151 - RNA, 20 nt, Homo sapiens
  source 1..20: mol_type = genomic RNA
gtgggttggggcgggctctg

SEQ ID NO: 1152 - RNA, 20 nt, Homo sapiens
  source 1..20: mol_type = genomic RNA
cagagcccgccccaacccac

SEQ ID NO: 1153 - RNA, 23 nt, Homo sapiens
  source 1..23: mol_type = genomic RNA
ttcgggctggcctgctgctccgg

SEQ ID NO: 1154 - RNA, 23 nt, Homo sapiens
  source 1..23: mol_type = genomic RNA
ccggagcagcaggccagcccgaa

SEQ ID NO: 1155 - RNA, 21 nt, Homo sapiens
  source 1..21: mol_type = genomic RNA
tgtgcagcaggccaaccgaga

SEQ ID NO: 1156 - RNA, 21 nt, Homo sapiens
  source 1..21: mol_type = genomic RNA
tctcggttggcctgctgcaca

SEQ ID NO: 1157 - RNA, 22 nt, Homo sapiens
  source 1..22: mol_type = genomic RNA
cagggcaggaagaagtggacaa

SEQ ID NO: 1158 - RNA, 22 nt, Homo sapiens
  source 1..22: mol_type = genomic RNA
ttgtccacttcttcctgccctg

SEQ ID NO: 1159 - RNA, 22 nt, Homo sapiens
  source 1..22: mol_type = genomic RNA
gtccacttctgcctgccctgcc

SEQ ID NO: 1160 - RNA, 22 nt, Homo sapiens
  source 1..22: mol_type = genomic RNA
ggcagggcaggcagaagtggac

SEQ ID NO: 1161 - RNA, 22 nt, Homo sapiens
  source 1..22: mol_type = genomic RNA
tttggacagaaaacacgcaggt

SEQ ID NO: 1162 - RNA, 22 nt, Homo sapiens
  source 1..22: mol_type = genomic RNA
acctgcgtgttttctgtccaaa

SEQ ID NO: 1163 - RNA, 20 nt, Homo sapiens
  source 1..20: mol_type = genomic RNA
cctgcgtgttttctgtccaa

SEQ ID NO: 1164 - RNA, 20 nt, Homo sapiens
  source 1..20: mol_type = genomic RNA
ttggacagaaaacacgcagg

SEQ ID NO: 1165 - RNA, 22 nt, Homo sapiens
  source 1..22: mol_type = genomic RNA
tgccgccctctcgctgctctag

SEQ ID NO: 1166 - RNA, 22 nt, Homo sapiens
  source 1..22: mol_type = genomic RNA
ctagagcagcgagagggcggca

SEQ ID NO: 1167 - RNA, 23 nt, Homo sapiens
  source 1..23: mol_type = genomic RNA
gagggcagcgtgggtgtggcgga

SEQ ID NO: 1168 - RNA, 23 nt, Homo sapiens
  source 1..23: mol_type = genomic RNA
tccgccacacccacgctgccctc

SEQ ID NO: 1169 - RNA, 22 nt, Homo sapiens
  source 1..22: mol_type = genomic RNA
aggagctagccaggcatatgca

SEQ ID NO: 1170 - RNA, 22 nt, Homo sapiens
  source 1..22: mol_type = genomic RNA
tgcatatgcctggctagctcct

SEQ ID NO: 1171 - RNA, 20 nt, Homo sapiens
  source 1..20: mol_type = genomic RNA
atatgcctggctagctcctc

SEQ ID NO: 1172 - RNA, 20 nt, Homo sapiens
  source 1..20: mol_type = genomic RNA
gaggagctagccaggcatat

SEQ ID NO: 1173 - RNA, 19 nt, Homo sapiens
  source 1..19: mol_type = genomic RNA
cggcgcgaccggcccgggg

SEQ ID NO: 1174 - RNA, 19 nt, Homo sapiens
  source 1..19: mol_type = genomic RNA
ccccgggccggtcgcgccg

SEQ ID NO: 1175 - RNA, 21 nt, Homo sapiens
  source 1..21: mol_type = genomic RNA
tcttgaagtcagaacccgcaa

SEQ ID NO: 1176 - RNA, 21 nt, Homo sapiens
  source 1..21: mol_type = genomic RNA
ttgcgggttctgacttcaaga

SEQ ID NO: 1177 - RNA, 22 nt, Homo sapiens
  source 1..22: mol_type = genomic RNA
aactcgtgttcaaagcctttag

SEQ ID NO: 1178 - RNA, 22 nt, Homo sapiens
  source 1..22: mol_type = genomic RNA
ctaaaggctttgaacacgagtt

SEQ ID NO: 1179 - RNA, 23 nt, Homo sapiens
  source 1..23: mol_type = genomic RNA
cctggacaccgctcagccggccg

SEQ ID NO: 1180 - RNA, 23 nt, Homo sapiens
  source 1..23: mol_type = genomic RNA
cggccggctgagcggtgtccagg

SEQ ID NO: 1181 - RNA, 21 nt, Homo sapiens
  source 1..21: mol_type = genomic RNA
actcggctgcggtggacaagt

SEQ ID NO: 1182 - RNA, 21 nt, Homo sapiens
  source 1..21: mol_type = genomic RNA
acttgtccaccgcagccgagt

SEQ ID NO: 1183 - RNA, 20 nt, Homo sapiens
  source 1..20: mol_type = genomic RNA
tcactctcaccttgctttgc

SEQ ID NO: 1184 - RNA, 20 nt, Homo sapiens
  source 1..20: mol_type = genomic RNA
gcaaagcaaggtgagagtga

SEQ ID NO: 1185 - RNA, 22 nt, Homo sapiens
  source 1..22: mol_type = genomic RNA
ttgctaagtaggctgagattga

SEQ ID NO: 1186 - RNA, 22 nt, Homo sapiens
  source 1..22: mol_type = genomic RNA
tcaatctcagcctacttagcaa

SEQ ID NO: 1187 - RNA, 22 nt, Homo sapiens
  source 1..22: mol_type = genomic RNA
caccccctgtttcctggcccac

SEQ ID NO: 1188 - RNA, 22 nt, Homo sapiens
  source 1..22: mol_type = genomic RNA
gtgggccaggaaacagggggtg

SEQ ID NO: 1189 - RNA, 23 nt, Homo sapiens
  source 1..23: mol_type = genomic RNA
tgggccagggagcagctggtggg

SEQ ID NO: 1190 - RNA, 23 nt, Homo sapiens
  source 1..23: mol_type = genomic RNA
cccaccagctgctccctggccca

SEQ ID NO: 1191 - RNA, 24 nt, Homo sapiens
  source 1..24: mol_type = genomic RNA
tgcccatgccatacttttgcctca

SEQ ID NO: 1192 - RNA, 24 nt, Homo sapiens
  source 1..24: mol_type = genomic RNA
tgaggcaaaagtatggcatgggca

SEQ ID NO: 1193 - RNA, 22 nt, Homo sapiens
  source 1..22: mol_type = genomic RNA
atggcatcgtcccctggtggct

SEQ ID NO: 1194 - RNA, 22 nt, Homo sapiens
  source 1..22: mol_type = genomic RNA
agccaccaggggacgatgccat

SEQ ID NO: 1195 - RNA, 22 nt, Homo sapiens
  source 1..22: mol_type = genomic RNA
gacacatgaccataaatgctaa

SEQ ID NO: 1196 - RNA, 22 nt, Homo sapiens
  source 1..22: mol_type = genomic RNA
ttagcatttatggtcatgtgtc

SEQ ID NO: 1197 - RNA, 23 nt, Homo sapiens
  source 1..23: mol_type = genomic RNA
tggagagagaaaagagacagaag

SEQ ID NO: 1198 - RNA, 23 nt, Homo sapiens
  source 1..23: mol_type = genomic RNA
cttctgtctcttttctctctcca

SEQ ID NO: 1199 - RNA, 22 nt, Homo sapiens
  source 1..22: mol_type = genomic RNA
agacagtagttcttgcctggtt

SEQ ID NO: 1200 - RNA, 22 nt, Homo sapiens
  source 1..22: mol_type = genomic RNA
aaccaggcaagaactactgtct

SEQ ID NO: 1201 - RNA, 19 nt, Homo sapiens
  source 1..19: mol_type = genomic RNA
accaggcaagaaatattgt

SEQ ID NO: 1202 - RNA, 19 nt, Homo sapiens
  source 1..19: mol_type = genomic RNA
acaatatttcttgcctggt

SEQ ID NO: 1203 - RNA, 21 nt, Homo sapiens
  source 1..21: mol_type = genomic RNA
attgtccctctcccttcccag

SEQ ID NO: 1204 - RNA, 21 nt, Homo sapiens
  source 1..21: mol_type = genomic RNA
ctgggaagggagagggacaat

SEQ ID NO: 1205 - RNA, 22 nt, Homo sapiens
  source 1..22: mol_type = genomic RNA
actgggaagaggagctgaggga

SEQ ID NO: 1206 - RNA, 22 nt, Homo sapiens
  source 1..22: mol_type = genomic RNA
tccctcagctcctcttcccagt

SEQ ID NO: 1207 - RNA, 23 nt, Homo sapiens
  source 1..23: mol_type = genomic RNA
gaagatggtgctgtgctgaggaa

SEQ ID NO: 1208 - RNA, 23 nt, Homo sapiens
  source 1..23: mol_type = genomic RNA
ttcctcagcacagcaccatcttc

SEQ ID NO: 1209 - RNA, 20 nt, Homo sapiens
  source 1..20: mol_type = genomic RNA
tgtgggactgcaaatgggag

SEQ ID NO: 1210 - RNA, 20 nt, Homo sapiens
  source 1..20: mol_type = genomic RNA
ctcccatttgcagtcccaca

SEQ ID NO: 1211 - RNA, 21 nt, Homo sapiens
  source 1..21: mol_type = genomic RNA
tctgaggcctgcctctcccca

SEQ ID NO: 1212 - RNA, 21 nt, Homo sapiens
  source 1..21: mol_type = genomic RNA
tggggagaggcaggcctcaga

SEQ ID NO: 1213 - RNA, 24 nt, Homo sapiens
  source 1..24: mol_type = genomic RNA
tgggcgaggggtgggctctcagag

SEQ ID NO: 1214 - RNA, 24 nt, Homo sapiens
  source 1..24: mol_type = genomic RNA
ctctgagagcccacccctcgccca

SEQ ID NO: 1215 - RNA, 21 nt, Homo sapiens
  source 1..21: mol_type = genomic RNA
aggtagaatgaggcctgacat

SEQ ID NO: 1216 - RNA, 21 nt, Homo sapiens
  source 1..21: mol_type = genomic RNA
atgtcaggcctcattctacct

SEQ ID NO: 1217 - RNA, 19 nt, Homo sapiens
  source 1..19: mol_type = genomic RNA
tcaggcctctttctacctt

SEQ ID NO: 1218 - RNA, 19 nt, Homo sapiens
  source 1..19: mol_type = genomic RNA
aaggtagaaagaggcctga

SEQ ID NO: 1219 - RNA, 20 nt, Homo sapiens
  source 1..20: mol_type = genomic RNA
cggggtgggtgaggtcgggc

SEQ ID NO: 1220 - RNA, 20 nt, Homo sapiens
  source 1..20: mol_type = genomic RNA
gcccgacctcacccaccccg

SEQ ID NO: 1221 - RNA, 22 nt, Homo sapiens
  source 1..22: mol_type = genomic RNA
gttctgttaacccatcccctca

SEQ ID NO: 1222 - RNA, 22 nt, Homo sapiens
  source 1..22: mol_type = genomic RNA
tgaggggatgggttaacagaac

SEQ ID NO: 1223 - RNA, 22 nt, Homo sapiens
  source 1..22: mol_type = genomic RNA
aggggactggttaatagaacta

SEQ ID NO: 1224 - RNA, 22 nt, Homo sapiens
  source 1..22: mol_type = genomic RNA
tagttctattaaccagtcccct

SEQ ID NO: 1225 - RNA, 23 nt, Homo sapiens
  source 1..23: mol_type = genomic RNA
tggagttaagggttgcttggaga

SEQ ID NO: 1226 - RNA, 23 nt, Homo sapiens
  source 1..23: mol_type = genomic RNA
tctccaagcaacccttaactcca

SEQ ID NO: 1227 - RNA, 22 nt, Homo sapiens
  source 1..22: mol_type = genomic RNA
tctctgagcaaggcttaacacc

SEQ ID NO: 1228 - RNA, 22 nt, Homo sapiens
  source 1..22: mol_type = genomic RNA
ggtgttaagccttgctcagaga

SEQ ID NO: 1229 - RNA, 22 nt, Homo sapiens
  source 1..22: mol_type = genomic RNA
tgtgggatctggaggcatctgg

SEQ ID NO: 1230 - RNA, 22 nt, Homo sapiens
  source 1..22: mol_type = genomic RNA
ccagatgcctccagatcccaca

SEQ ID NO: 1231 - RNA, 21 nt, Homo sapiens
  source 1..21: mol_type = genomic RNA
accctcgtcaggtccccgggg

SEQ ID NO: 1232 - RNA, 21 nt, Homo sapiens
  source 1..21: mol_type = genomic RNA
ccccggggacctgacgagggt

SEQ ID NO: 1233 - RNA, 22 nt, Homo sapiens
  source 1..22: mol_type = genomic RNA
caccggggatggcagagggtcg

SEQ ID NO: 1234 - RNA, 22 nt, Homo sapiens
  source 1..22: mol_type = genomic RNA
cgaccctctgccatccccggtg

SEQ ID NO: 1235 - RNA, 23 nt, Homo sapiens
  source 1..23: mol_type = genomic RNA
tgggctgagggcaggaggcctgt

SEQ ID NO: 1236 - RNA, 23 nt, Homo sapiens
  source 1..23: mol_type = genomic RNA
acaggcctcctgccctcagccca

SEQ ID NO: 1237 - RNA, 23 nt, Homo sapiens
  source 1..23: mol_type = genomic RNA
aatgtggaagtggtctgaggcat

SEQ ID NO: 1238 - RNA, 23 nt, Homo sapiens
  source 1..23: mol_type = genomic RNA
atgcctcagaccacttccacatt

SEQ ID NO: 1239 - RNA, 23 nt, Homo sapiens
  source 1..23: mol_type = genomic RNA
gtgagtgtggatcctggaggaat

SEQ ID NO: 1240 - RNA, 23 nt, Homo sapiens
  source 1..23: mol_type = genomic RNA
attcctccaggatccacactcac

SEQ ID NO: 1241 - RNA, 22 nt, Homo sapiens
  source 1..22: mol_type = genomic RNA
tttcttcttagacatggcaacg

SEQ ID NO: 1242 - RNA, 22 nt, Homo sapiens
  source 1..22: mol_type = genomic RNA
cgttgccatgtctaagaagaaa

SEQ ID NO: 1243 - RNA, 22 nt, Homo sapiens
  source 1..22: mol_type = genomic RNA
ctgccatgtctaagaagaaaac

SEQ ID NO: 1244 - RNA, 22 nt, Homo sapiens
  source 1..22: mol_type = genomic RNA
gttttcttcttagacatggcag

SEQ ID NO: 1245 - RNA, 22 nt, Homo sapiens
  source 1..22: mol_type = genomic RNA
tttcttcttagacatggcagct

SEQ ID NO: 1246 - RNA, 22 nt, Homo sapiens
  source 1..22: mol_type = genomic RNA
agctgccatgtctaagaagaaa

SEQ ID NO: 1247 - RNA, 19 nt, Homo sapiens
  source 1..19: mol_type = genomic RNA
ttgccatgtctaagaagaa

SEQ ID NO: 1248 - RNA, 19 nt, Homo sapiens
  source 1..19: mol_type = genomic RNA
ttcttcttagacatggcaa

SEQ ID NO: 1249 - RNA, 23 nt, Homo sapiens
  source 1..23: mol_type = genomic RNA
tgcagctctggtggaaaatggag

SEQ ID NO: 1250 - RNA, 23 nt, Homo sapiens
  source 1..23: mol_type = genomic RNA
ctccattttccaccagagctgca

SEQ ID NO: 1251 - RNA, 22 nt, Homo sapiens
  source 1..22: mol_type = genomic RNA
caggatccacagagctagtcca

SEQ ID NO: 1252 - RNA, 22 nt, Homo sapiens
  source 1..22: mol_type = genomic RNA
tggactagctctgtggatcctg

SEQ ID NO: 1253 - RNA, 22 nt, Homo sapiens
  source 1..22: mol_type = genomic RNA
aactagctctgtggatcctgac

SEQ ID NO: 1254 - RNA, 22 nt, Homo sapiens
  source 1..22: mol_type = genomic RNA
gtcaggatccacagagctagtt

SEQ ID NO: 1255 - RNA, 22 nt, Homo sapiens
  source 1..22: mol_type = genomic RNA
aaagatggacaattggctaaat

SEQ ID NO: 1256 - RNA, 22 nt, Homo sapiens
  source 1..22: mol_type = genomic RNA
atttagccaattgtccatcttt

SEQ ID NO: 1257 - RNA, 24 nt, Homo sapiens
  source 1..24: mol_type = genomic RNA
agctgagctccatggacgtgcagt

SEQ ID NO: 1258 - RNA, 24 nt, Homo sapiens
  source 1..24: mol_type = genomic RNA
actgcacgtccatggagctcagct

SEQ ID NO: 1259 - RNA, 22 nt, Homo sapiens
  source 1..22: mol_type = genomic RNA
cttccggtctgtgagccccgtc

SEQ ID NO: 1260 - RNA, 22 nt, Homo sapiens
  source 1..22: mol_type = genomic RNA
gacggggctcacagaccggaag

SEQ ID NO: 1261 - RNA, 22 nt, Homo sapiens
  source 1..22: mol_type = genomic RNA
tggggtgcccactccgcaagtt

SEQ ID NO: 1262 - RNA, 22 nt, Homo sapiens
  source 1..22: mol_type = genomic RNA
aacttgcggagtgggcacccca

SEQ ID NO: 1263 - RNA, 26 nt, Homo sapiens
  source 1..26: mol_type = genomic RNA
ctcggccgcggcgcgtagcccccgcc

SEQ ID NO: 1264 - RNA, 26 nt, Homo sapiens
  source 1..26: mol_type = genomic RNA
ggcgggggctacgcgccgcggccgag

SEQ ID NO: 1265 - RNA, 23 nt, Homo sapiens
  source 1..23: mol_type = genomic RNA
ctgggggacgcgtgagcgcgagc

SEQ ID NO: 1266 - RNA, 23 nt, Homo sapiens
  source 1..23: mol_type = genomic RNA
gctcgcgctcacgcgtcccccag

SEQ ID NO: 1267 - RNA, 21 nt, Homo sapiens
  source 1..21: mol_type = genomic RNA
catacaatctgacatgtattt

SEQ ID NO: 1268 - RNA, 21 nt, Homo sapiens
  source 1..21: mol_type = genomic RNA
aaatacatgtcagattgtatg

SEQ ID NO: 1269 - RNA, 21 nt, Homo sapiens
  source 1..21: mol_type = genomic RNA
atacatgtcagattgtatgcc

SEQ ID NO: 1270 - RNA, 21 nt, Homo sapiens
  source 1..21: mol_type = genomic RNA
ggcatacaatctgacatgtat

SEQ ID NO: 1271 - RNA, 21 nt, Homo sapiens
  source 1..21: mol_type = genomic RNA
tccctccttctgtccccacag

SEQ ID NO: 1272 - RNA, 21 nt, Homo sapiens
  source 1..21: mol_type = genomic RNA
ctgtggggacagaaggaggga

SEQ ID NO: 1273 - RNA, 22 nt, Homo sapiens
  source 1..22: mol_type = genomic RNA
actggggagcagaaggagaacc

SEQ ID NO: 1274 - RNA, 22 nt, Homo sapiens
  source 1..22: mol_type = genomic RNA
ggttctccttctgctccccagt

SEQ ID NO: 1275 - RNA, 23 nt, Homo sapiens
  source 1..23: mol_type = genomic RNA
gaaaatcctttttgtttttccag

SEQ ID NO: 1276 - RNA, 23 nt, Homo sapiens
  source 1..23: mol_type = genomic RNA
ctggaaaaacaaaaaggattttc

SEQ ID NO: 1277 - RNA, 23 nt, Homo sapiens
  source 1..23: mol_type = genomic RNA
agggaaaaaaaaaaggatttgtc

SEQ ID NO: 1278 - RNA, 23 nt, Homo sapiens
  source 1..23: mol_type = genomic RNA
gacaaatccttttttttttccct

SEQ ID NO: 1279 - RNA, 22 nt, Homo sapiens
  source 1..22: mol_type = genomic RNA
tgtgtccgggaagtggaggagg

SEQ ID NO: 1280 - RNA, 22 nt, Homo sapiens
  source 1..22: mol_type = genomic RNA
cctcctccacttcccggacaca

SEQ ID NO: 1281 - RNA, 22 nt, Homo sapiens
  source 1..22: mol_type = genomic RNA
tgaagttacatcatggtcgctt

SEQ ID NO: 1282 - RNA, 22 nt, Homo sapiens
  source 1..22: mol_type = genomic RNA
aagcgaccatgatgtaacttca

SEQ ID NO: 1283 - RNA, 22 nt, Homo sapiens
  source 1..22: mol_type = genomic RNA
aagcgaccatgatgtaacttca

SEQ ID NO: 1284 - RNA, 22 nt, Homo sapiens
  source 1..22: mol_type = genomic RNA
tgaagttacatcatggtcgctt

SEQ ID NO: 1285 - RNA, 21 nt, Homo sapiens
  source 1..21: mol_type = genomic RNA
ttagtgcatagtctttggtct

SEQ ID NO: 1286 - RNA, 21 nt, Homo sapiens
  source 1..21: mol_type = genomic RNA
agaccaaagactatgcactaa

SEQ ID NO: 1287 - RNA, 22 nt, Homo sapiens
  source 1..22: mol_type = genomic RNA
accgaagactgtgcgctaatct

SEQ ID NO: 1288 - RNA, 22 nt, Homo sapiens
  source 1..22: mol_type = genomic RNA
agattagcgcacagtcttcggt

SEQ ID NO: 1289 - RNA, 21 nt, Homo sapiens
  source 1..21: mol_type = genomic RNA
ttacacagctggacagaggca

SEQ ID NO: 1290 - RNA, 21 nt, Homo sapiens
  source 1..21: mol_type = genomic RNA
tgcctctgtccagctgtgtaa

SEQ ID NO: 1291 - RNA, 22 nt, Homo sapiens
  source 1..22: mol_type = genomic RNA
tccaggcaggagccggactgga

SEQ ID NO: 1292 - RNA, 22 nt, Homo sapiens
  source 1..22: mol_type = genomic RNA
tccagtccggctcctgcctgga

SEQ ID NO: 1293 - RNA, 21 nt, Homo sapiens
  source 1..21: mol_type = genomic RNA
ctgggctcgggacgcgcggct

SEQ ID NO: 1294 - RNA, 21 nt, Homo sapiens
  source 1..21: mol_type = genomic RNA
agccgcgcgtcccgagcccag

SEQ ID NO: 1295 - RNA, 22 nt, Homo sapiens
  source 1..22: mol_type = genomic RNA
ggggctgtgattgaccagcagg

SEQ ID NO: 1296 - RNA, 22 nt, Homo sapiens
  source 1..22: mol_type = genomic RNA
cctgctggtcaatcacagcccc

SEQ ID NO: 1297 - RNA, 22 nt, Homo sapiens
  source 1..22: mol_type = genomic RNA
cactgtttcaccactggctctt

SEQ ID NO: 1298 - RNA, 22 nt, Homo sapiens
  source 1..22: mol_type = genomic RNA
aagagccagtggtgaaacagtg

SEQ ID NO: 1299 - RNA, 21 nt, Homo sapiens
  source 1..21: mol_type = genomic RNA
gagccagtggtgagacagtga

SEQ ID NO: 1300 - RNA, 21 nt, Homo sapiens
  source 1..21: mol_type = genomic RNA
tcactgtctcaccactggctc

SEQ ID NO: 1301 - RNA, 22 nt, Homo sapiens
  source 1..22: mol_type = genomic RNA
aaggtattgttcagacttatga

SEQ ID NO: 1302 - RNA, 22 nt, Homo sapiens
  source 1..22: mol_type = genomic RNA
tcataagtctgaacaatacctt

SEQ ID NO: 1303 - RNA, 22 nt, Homo sapiens
  source 1..22: mol_type = genomic RNA
tctgtgatagagattctttgct

SEQ ID NO: 1304 - RNA, 22 nt, Homo sapiens
  source 1..22: mol_type = genomic RNA
agcaaagaatctctatcacaga

SEQ ID NO: 1305 - RNA, 21 nt, Homo sapiens
  source 1..21: mol_type = genomic RNA
tctgaattgtaagagttgtta

SEQ ID NO: 1306 - RNA, 21 nt, Homo sapiens
  source 1..21: mol_type = genomic RNA
taacaactcttacaattcaga

SEQ ID NO: 1307 - RNA, 23 nt, Homo sapiens
  source 1..23: mol_type = genomic RNA
agaactcttgcagtcttagatgt

SEQ ID NO: 1308 - RNA, 23 nt, Homo sapiens
  source 1..23: mol_type = genomic RNA
acatctaagactgcaagagttct

SEQ ID NO: 1309 - RNA, 22 nt, Homo sapiens
  source 1..22: mol_type = genomic RNA
aacgggaatgcaggctgtatct

SEQ ID NO: 1310 - RNA, 22 nt, Homo sapiens
  source 1..22: mol_type = genomic RNA
agatacagcctgcattcccgtt

SEQ ID NO: 1311 - RNA, 23 nt, Homo sapiens
  source 1..23: mol_type = genomic RNA
tctgagttcctggagcctggtct

SEQ ID NO: 1312 - RNA, 23 nt, Homo sapiens
  source 1..23: mol_type = genomic RNA
agaccaggctccaggaactcaga

SEQ ID NO: 1313 - RNA, 23 nt, Homo sapiens
  source 1..23: mol_type = genomic RNA
tggagatccagtgctcgcccgat

SEQ ID NO: 1314 - RNA, 23 nt, Homo sapiens
  source 1..23: mol_type = genomic RNA
atcgggcgagcactggatctcca

SEQ ID NO: 1315 - RNA, 22 nt, Homo sapiens
  source 1..22: mol_type = genomic RNA
tgttgcaagtcggtggagacgt

SEQ ID NO: 1316 - RNA, 22 nt, Homo sapiens
  source 1..22: mol_type = genomic RNA
acgtctccaccgacttgcaaca

SEQ ID NO: 1317 - RNA, 22 nt, Homo sapiens
  source 1..22: mol_type = genomic RNA
ctctctactgacttgcaacata

SEQ ID NO: 1318 - RNA, 22 nt, Homo sapiens
  source 1..22: mol_type = genomic RNA
tatgttgcaagtcagtagagag

SEQ ID NO: 1319 - RNA, 22 nt, Homo sapiens
  source 1..22: mol_type = genomic RNA
tctcccttcctgccctggctag

SEQ ID NO: 1320 - RNA, 22 nt, Homo sapiens
  source 1..22: mol_type = genomic RNA
ctagccagggcaggaagggaga

SEQ ID NO: 1321 - RNA, 26 nt, Homo sapiens
  source 1..26: mol_type = genomic RNA
cccagggcttggagtggggcaaggtt

SEQ ID NO: 1322 - RNA, 26 nt, Homo sapiens
  source 1..26: mol_type = genomic RNA
aaccttgccccactccaagccctggg

SEQ ID NO: 1323 - RNA, 23 nt, Homo sapiens
  source 1..23: mol_type = genomic RNA
tatctgctgggctttctggtgtt

SEQ ID NO: 1324 - RNA, 23 nt, Homo sapiens
  source 1..23: mol_type = genomic RNA
aacaccagaaagcccagcagata

SEQ ID NO: 1325 - RNA, 21 nt, Homo sapiens
  source 1..21: mol_type = genomic RNA
tggctgttggagggggcaggc

SEQ ID NO: 1326 - RNA, 21 nt, Homo sapiens
  source 1..21: mol_type = genomic RNA
gcctgccccctccaacagcca

SEQ ID NO: 1327 - RNA, 22 nt, Homo sapiens
  source 1..22: mol_type = genomic RNA
cagccctcctcccgcacccaaa

SEQ ID NO: 1328 - RNA, 22 nt, Homo sapiens
  source 1..22: mol_type = genomic RNA
tttgggtgcgggaggagggctg

SEQ ID NO: 1329 - RNA, 22 nt, Homo sapiens
  source 1..22: mol_type = genomic RNA
taggggcagcagaggacctggg

SEQ ID NO: 1330 - RNA, 22 nt, Homo sapiens
  source 1..22: mol_type = genomic RNA
cccaggtcctctgctgccccta

SEQ ID NO: 1331 - RNA, 22 nt, Homo sapiens
  source 1..22: mol_type = genomic RNA
ttgaggagacatggtgggggcc

SEQ ID NO: 1332 - RNA, 22 nt, Homo sapiens
  source 1..22: mol_type = genomic RNA
ggcccccaccatgtctcctcaa

SEQ ID NO: 1333 - RNA, 21 nt, Homo sapiens
  source 1..21: mol_type = genomic RNA
gcagcccagctgaggcctctg

SEQ ID NO: 1334 - RNA, 21 nt, Homo sapiens
  source 1..21: mol_type = genomic RNA
cagaggcctcagctgggctgc

SEQ ID NO: 1335 - RNA, 22 nt, Homo sapiens
  source 1..22: mol_type = genomic RNA
gagcaggcgaggctgggctgaa

SEQ ID NO: 1336 - RNA, 22 nt, Homo sapiens
  source 1..22: mol_type = genomic RNA
ttcagcccagcctcgcctgctc

SEQ ID NO: 1337 - RNA, 23 nt, Homo sapiens
  source 1..23: mol_type = genomic RNA
ccagccacggactgagagtgcat

SEQ ID NO: 1338 - RNA, 23 nt, Homo sapiens
  source 1..23: mol_type = genomic RNA
atgcactctcagtccgtggctgg

SEQ ID NO: 1339 - RNA, 23 nt, Homo sapiens
  source 1..23: mol_type = genomic RNA
gtcctccaggccatgagctgcgg

SEQ ID NO: 1340 - RNA, 23 nt, Homo sapiens
  source 1..23: mol_type = genomic RNA
ccgcagctcatggcctggaggac

SEQ ID NO: 1341 - RNA, 22 nt, Homo sapiens
  source 1..22: mol_type = genomic RNA
tcaggcagtgtgggtatcagat

SEQ ID NO: 1342 - RNA, 22 nt, Homo sapiens
  source 1..22: mol_type = genomic RNA
atctgatacccacactgcctga

SEQ ID NO: 1343 - RNA, 23 nt, Homo sapiens
  source 1..23: mol_type = genomic RNA
tgagagtggaattcacagtattt

SEQ ID NO: 1344 - RNA, 23 nt, Homo sapiens
  source 1..23: mol_type = genomic RNA
aaatactgtgaattccactctca

SEQ ID NO: 1345 - RNA, 23 nt, Homo sapiens
  source 1..23: mol_type = genomic RNA
atactgtgaatttcactgtcaca

SEQ ID NO: 1346 - RNA, 23 nt, Homo sapiens
  source 1..23: mol_type = genomic RNA
tgtgacagtgaaattcacagtat

SEQ ID NO: 1347 - RNA, 21 nt, Homo sapiens
  source 1..21: mol_type = genomic RNA
caaatggacaggataacacct

SEQ ID NO: 1348 - RNA, 21 nt, Homo sapiens
  source 1..21: mol_type = genomic RNA
aggtgttatcctgtccatttg

SEQ ID NO: 1349 - RNA, 22 nt, Homo sapiens
  source 1..22: mol_type = genomic RNA
aggtgttatcctatccatttgc

SEQ ID NO: 1350 - RNA, 22 nt, Homo sapiens
  source 1..22: mol_type = genomic RNA
gcaaatggataggataacacct

SEQ ID NO: 1351 - RNA, 22 nt, Homo sapiens
  source 1..22: mol_type = genomic RNA
tgatctcaccgctgcctccttc

SEQ ID NO: 1352 - RNA, 22 nt, Homo sapiens
  source 1..22: mol_type = genomic RNA
gaaggaggcagcggtgagatca

SEQ ID NO: 1353 - RNA, 22 nt, Homo sapiens
  source 1..22: mol_type = genomic RNA
caggaggcagtgggcgagcagg

SEQ ID NO: 1354 - RNA, 22 nt, Homo sapiens
  source 1..22: mol_type = genomic RNA
cctgctcgcccactgcctcctg

SEQ ID NO: 1355 - RNA, 22 nt, Homo sapiens
  source 1..22: mol_type = genomic RNA
tgcaagacggatactgtcatct

SEQ ID NO: 1356 - RNA, 22 nt, Homo sapiens
  source 1..22: mol_type = genomic RNA
agatgacagtatccgtcttgca

SEQ ID NO: 1357 - RNA, 24 nt, Homo sapiens
  source 1..24: mol_type = genomic RNA
tgtcagtgactcctgccccttggt

SEQ ID NO: 1358 - RNA, 24 nt, Homo sapiens
  source 1..24: mol_type = genomic RNA
accaaggggcaggagtcactgaca

SEQ ID NO: 1359 - RNA, 22 nt, Homo sapiens
  source 1..22: mol_type = genomic RNA
agggggcgcagtcactgacgtg

SEQ ID NO: 1360 - RNA, 22 nt, Homo sapiens
  source 1..22: mol_type = genomic RNA
cacgtcagtgactgcgccccct

SEQ ID NO: 1361 - RNA, 23 nt, Homo sapiens
  source 1..23: mol_type = genomic RNA
tcaaaatgtagaggaagacccca

SEQ ID NO: 1362 - RNA, 23 nt, Homo sapiens
  source 1..23: mol_type = genomic RNA
tggggtcttcctctacattttga

SEQ ID NO: 1363 - RNA, 22 nt, Homo sapiens
  source 1..22: mol_type = genomic RNA
aatttactctgcaatcttctcc

SEQ ID NO: 1364 - RNA, 22 nt, Homo sapiens
  source 1..22: mol_type = genomic RNA
ggagaagattgcagagtaaatt

SEQ ID NO: 1365 - RNA, 22 nt, Homo sapiens
  source 1..22: mol_type = genomic RNA
agaagattgcagagtaagttcc

SEQ ID NO: 1366 - RNA, 22 nt, Homo sapiens
  source 1..22: mol_type = genomic RNA
ggaacttactctgcaatcttct

SEQ ID NO: 1367 - RNA, 26 nt, Homo sapiens
  source 1..26: mol_type = genomic RNA
cacaggactgactcctcaccccagtg

SEQ ID NO: 1368 - RNA, 26 nt, Homo sapiens
  source 1..26: mol_type = genomic RNA
cactggggtgaggagtcagtcctgtg

SEQ ID NO: 1369 - RNA, 22 nt, Homo sapiens
  source 1..22: mol_type = genomic RNA
tctggggatgaggacagtgtgt

SEQ ID NO: 1370 - RNA, 22 nt, Homo sapiens
  source 1..22: mol_type = genomic RNA
acacactgtcctcatccccaga

SEQ ID NO: 1371 - RNA, 20 nt, Homo sapiens
  source 1..20: mol_type = genomic RNA
atgggtgatgggtgtggtgt

SEQ ID NO: 1372 - RNA, 20 nt, Homo sapiens
  source 1..20: mol_type = genomic RNA
acaccacacccatcacccat

SEQ ID NO: 1373 - RNA, 22 nt, Homo sapiens
  source 1..22: mol_type = genomic RNA
ttggccaccacacctacccctt

SEQ ID NO: 1374 - RNA, 22 nt, Homo sapiens
  source 1..22: mol_type = genomic RNA
aaggggtaggtgtggtggccaa

SEQ ID NO: 1375 - RNA, 22 nt, Homo sapiens
  source 1..22: mol_type = genomic RNA
tgtagttgtattgtattgccac

SEQ ID NO: 1376 - RNA, 22 nt, Homo sapiens
  source 1..22: mol_type = genomic RNA
gtggcaatacaatacaactaca

SEQ ID NO: 1377 - RNA, 23 nt, Homo sapiens
  source 1..23: mol_type = genomic RNA
tagcaatacagtacaaatatagt

SEQ ID NO: 1378 - RNA, 23 nt, Homo sapiens
  source 1..23: mol_type = genomic RNA
actatatttgtactgtattgcta

SEQ ID NO: 1379 - RNA, 22 nt, Homo sapiens
  source 1..22: mol_type = genomic RNA
tcagtcacatatctagtgtcta

SEQ ID NO: 1380 - RNA, 22 nt, Homo sapiens
  source 1..22: mol_type = genomic RNA
tagacactagatatgtgactga

SEQ ID NO: 1381 - RNA, 22 nt, Homo sapiens
  source 1..22: mol_type = genomic RNA
gacactaggcatgtgagtgatt

SEQ ID NO: 1382 - RNA, 22 nt, Homo sapiens
  source 1..22: mol_type = genomic RNA
aatcactcacatgcctagtgtc

SEQ ID NO: 1383 - RNA, 22 nt, Homo sapiens
  source 1..22: mol_type = genomic RNA
tcaatcacttggtaattgctgt

SEQ ID NO: 1384 - RNA, 22 nt, Homo sapiens
  source 1..22: mol_type = genomic RNA
acagcaattaccaagtgattga

SEQ ID NO: 1385 - RNA, 25 nt, Homo sapiens
  source 1..25: mol_type = genomic RNA
agcggggaggaagtgggcgctgctt

SEQ ID NO: 1386 - RNA, 25 nt, Homo sapiens
  source 1..25: mol_type = genomic RNA
aagcagcgcccacttcctccccgct

SEQ ID NO: 1387 - RNA, 22 nt, Homo sapiens
  source 1..22: mol_type = genomic RNA
agcccgccccagccgaggttct

SEQ ID NO: 1388 - RNA, 22 nt, Homo sapiens
  source 1..22: mol_type = genomic RNA
agaacctcggctggggcgggct

SEQ ID NO: 1389 - RNA, 23 nt, Homo sapiens
  source 1..23: mol_type = genomic RNA
gccccggcgcgggcgggttctgg

SEQ ID NO: 1390 - RNA, 23 nt, Homo sapiens
  source 1..23: mol_type = genomic RNA
ccagaacccgcccgcgccggggc

SEQ ID NO: 1391 - RNA, 22 nt, Homo sapiens
  source 1..22: mol_type = genomic RNA
agcaaggcggcatctctctgat

SEQ ID NO: 1392 - RNA, 22 nt, Homo sapiens
  source 1..22: mol_type = genomic RNA
atcagagagatgccgccttgct

SEQ ID NO: 1393 - RNA, 21 nt, Homo sapiens
  source 1..21: mol_type = genomic RNA
agagatgccgccttgctcctt

SEQ ID NO: 1394 - RNA, 21 nt, Homo sapiens
  source 1..21: mol_type = genomic RNA
aaggagcaaggcggcatctct

SEQ ID NO: 1395 - RNA, 23 nt, Homo sapiens
  source 1..23: mol_type = genomic RNA
ttgaagaggaggtgctctgtagc

SEQ ID NO: 1396 - RNA, 23 nt, Homo sapiens
  source 1..23: mol_type = genomic RNA
gctacagagcacctcctcttcaa

SEQ ID NO: 1397 - RNA, 22 nt, Homo sapiens
  source 1..22: mol_type = genomic RNA
acaacagtgacttgctctccaa

SEQ ID NO: 1398 - RNA, 22 nt, Homo sapiens
  source 1..22: mol_type = genomic RNA
ttggagagcaagtcactgttgt

SEQ ID NO: 1399 - RNA, 18 nt, Homo sapiens
  source 1..18: mol_type = genomic RNA
gggtgagggcaggtggtt

SEQ ID NO: 1400 - RNA, 18 nt, Homo sapiens
  source 1..18: mol_type = genomic RNA
aaccacctgccctcaccc

SEQ ID NO: 1401 - RNA, 18 nt, Homo sapiens
  source 1..18: mol_type = genomic RNA
cgtgtcttctggcttgat

SEQ ID NO: 1402 - RNA, 18 nt, Homo sapiens
  source 1..18: mol_type = genomic RNA
atcaagccagaagacacg

SEQ ID NO: 1403 - RNA, 23 nt, Homo sapiens
  source 1..23: mol_type = genomic RNA
tgcatcaggccagaagacatgag

SEQ ID NO: 1404 - RNA, 23 nt, Homo sapiens
  source 1..23: mol_type = genomic RNA
ctcatgtcttctggcctgatgca

SEQ ID NO: 1405 - RNA, 21 nt, Homo sapiens
  source 1..21: mol_type = genomic RNA
aatgagagacctgtactgtat

SEQ ID NO: 1406 - RNA, 21 nt, Homo sapiens
  source 1..21: mol_type = genomic RNA
atacagtacaggtctctcatt

SEQ ID NO: 1407 - RNA, 22 nt, Homo sapiens
  source 1..22: mol_type = genomic RNA
tccagtacaggtctctcatttc

SEQ ID NO: 1408 - RNA, 22 nt, Homo sapiens
  source 1..22: mol_type = genomic RNA
gaaatgagagacctgtactgga

SEQ ID NO: 1409 - RNA, 22 nt, Homo sapiens
  source 1..22: mol_type = genomic RNA
tgggatccagacagtgggagaa

SEQ ID NO: 1410 - RNA, 22 nt, Homo sapiens
  source 1..22: mol_type = genomic RNA
ttctcccactgtctggatccca

SEQ ID NO: 1411 - RNA, 22 nt, Homo sapiens
  source 1..22: mol_type = genomic RNA
ttctcccactaccaggctccca

SEQ ID NO: 1412 - RNA, 22 nt, Homo sapiens
  source 1..22: mol_type = genomic RNA
tgggagcctggtagtgggagaa

SEQ ID NO: 1413 - RNA, 22 nt, Homo sapiens
  source 1..22: mol_type = genomic RNA
ccaacctaggtggtcagagttg

SEQ ID NO: 1414 - RNA, 22 nt, Homo sapiens
  source 1..22: mol_type = genomic RNA
caactctgaccacctaggttgg

SEQ ID NO: 1415 - RNA, 22 nt, Homo sapiens
  source 1..22: mol_type = genomic RNA
aactctgaccccttaggttgat

SEQ ID NO: 1416 - RNA, 22 nt, Homo sapiens
  source 1..22: mol_type = genomic RNA
atcaacctaaggggtcagagtt

SEQ ID NO: 1417 - RNA, 23 nt, Homo sapiens
  source 1..23: mol_type = genomic RNA
gtgccaccttaactgcagccaat

SEQ ID NO: 1418 - RNA, 23 nt, Homo sapiens
  source 1..23: mol_type = genomic RNA
attggctgcagttaaggtggcac

SEQ ID NO: 1419 - RNA, 22 nt, Homo sapiens
  source 1..22: mol_type = genomic RNA
aagttggctgcagttaaggtgg

SEQ ID NO: 1420 - RNA, 22 nt, Homo sapiens
  source 1..22: mol_type = genomic RNA
ccaccttaactgcagccaactt

SEQ ID NO: 1421 - RNA, 22 nt, Homo sapiens
  source 1..22: mol_type = genomic RNA
aagggggaaggaaacatggaga

SEQ ID NO: 1422 - RNA, 22 nt, Homo sapiens
  source 1..22: mol_type = genomic RNA
tctccatgtttccttccccctt

SEQ ID NO: 1423 - RNA, 22 nt, Homo sapiens
  source 1..22: mol_type = genomic RNA
tccatgtttccttcccccttct

SEQ ID NO: 1424 - RNA, 22 nt, Homo sapiens
  source 1..22: mol_type = genomic RNA
agaagggggaaggaaacatgga

SEQ ID NO: 1425 - RNA, 21 nt, Homo sapiens
  source 1..21: mol_type = genomic RNA
acacatgggtggctgtggcct

SEQ ID NO: 1426 - RNA, 21 nt, Homo sapiens
  source 1..21: mol_type = genomic RNA
aggccacagccacccatgtgt

SEQ ID NO: 1427 - RNA, 22 nt, Homo sapiens
  source 1..22: mol_type = genomic RNA
taggccacagccacccatgtgt

SEQ ID NO: 1428 - RNA, 22 nt, Homo sapiens
  source 1..22: mol_type = genomic RNA
acacatgggtggctgtggccta

SEQ ID NO: 1429 - RNA, 21 nt, Homo sapiens
  source 1..21: mol_type = genomic RNA
agctgtacctgaaaccaagca

SEQ ID NO: 1430 - RNA, 21 nt, Homo sapiens
  source 1..21: mol_type = genomic RNA
tgcttggtttcaggtacagct

SEQ ID NO: 1431 - RNA, 22 nt, Homo sapiens
  source 1..22: mol_type = genomic RNA
tcacaaatctataatatgcagg

SEQ ID NO: 1432 - RNA, 22 nt, Homo sapiens
  source 1..22: mol_type = genomic RNA
cctgcatattatagatttgtga

SEQ ID NO: 1433 - RNA, 21 nt, Homo sapiens
  source 1..21: mol_type = genomic RNA
tgcttaagttgtaccaagtat

SEQ ID NO: 1434 - RNA, 21 nt, Homo sapiens
  source 1..21: mol_type = genomic RNA
atacttggtacaacttaagca

SEQ ID NO: 1435 - RNA, 22 nt, Homo sapiens
  source 1..22: mol_type = genomic RNA
cctggcatatttggtataactt

SEQ ID NO: 1436 - RNA, 22 nt, Homo sapiens
  source 1..22: mol_type = genomic RNA
aagttataccaaatatgccagg

SEQ ID NO: 1437 - RNA, 22 nt, Homo sapiens
  source 1..22: mol_type = genomic RNA
tgagggctccaggtgacggtgg

SEQ ID NO: 1438 - RNA, 22 nt, Homo sapiens
  source 1..22: mol_type = genomic RNA
ccaccgtcacctggagccctca

SEQ ID NO: 1439 - RNA, 22 nt, Homo sapiens
  source 1..22: mol_type = genomic RNA
acctgccagcacctccctgcag

SEQ ID NO: 1440 - RNA, 22 nt, Homo sapiens
  source 1..22: mol_type = genomic RNA
ctgcagggaggtgctggcaggt

SEQ ID NO: 1441 - RNA, 23 nt, Homo sapiens
  source 1..23: mol_type = genomic RNA
ggcaggagggctgtgccaggttg

SEQ ID NO: 1442 - RNA, 23 nt, Homo sapiens
  source 1..23: mol_type = genomic RNA
caacctggcacagccctcctgcc

SEQ ID NO: 1443 - RNA, 22 nt, Homo sapiens
  source 1..22: mol_type = genomic RNA
ccctctctggctcctccccaaa

SEQ ID NO: 1444 - RNA, 22 nt, Homo sapiens
  source 1..22: mol_type = genomic RNA
tttggggaggagccagagaggg

SEQ ID NO: 1445 - RNA, 24 nt, Homo sapiens
  source 1..24: mol_type = genomic RNA
tgggggagccatgagataagagca

SEQ ID NO: 1446 - RNA, 24 nt, Homo sapiens
  source 1..24: mol_type = genomic RNA
tgctcttatctcatggctccccca

SEQ ID NO: 1447 - RNA, 21 nt, Homo sapiens
  source 1..21: mol_type = genomic RNA
gtaccttctggttcagctagt

SEQ ID NO: 1448 - RNA, 21 nt, Homo sapiens
  source 1..21: mol_type = genomic RNA
actagctgaaccagaaggtac

SEQ ID NO: 1449 - RNA, 23 nt, Homo sapiens
  source 1..23: mol_type = genomic RNA
aactgaaccaggagtgagcttcg

SEQ ID NO: 1450 - RNA, 23 nt, Homo sapiens
  source 1..23: mol_type = genomic RNA
cgaagctcactcctggttcagtt

SEQ ID NO: 1451 - RNA, 22 nt, Homo sapiens
  source 1..22: mol_type = genomic RNA
tggggaaggcgtcagtgtcggg

SEQ ID NO: 1452 - RNA, 22 nt, Homo sapiens
  source 1..22: mol_type = genomic RNA
cccgacactgacgccttcccca

SEQ ID NO: 1453 - RNA, 21 nt, Homo sapiens
  source 1..21: mol_type = genomic RNA
agaccctgcagccttcccacc

SEQ ID NO: 1454 - RNA, 21 nt, Homo sapiens
  source 1..21: mol_type = genomic RNA
ggtgggaaggctgcagggtct

SEQ ID NO: 1455 - RNA, 22 nt, Homo sapiens
  source 1..22: mol_type = genomic RNA
acccaggttccctctggccgca

SEQ ID NO: 1456 - RNA, 22 nt, Homo sapiens
  source 1..22: mol_type = genomic RNA
tgcggccagagggaacctgggt

SEQ ID NO: 1457 - RNA, 23 nt, Homo sapiens
  source 1..23: mol_type = genomic RNA
agggccagaggagcctggagtgg

SEQ ID NO: 1458 - RNA, 23 nt, Homo sapiens
  source 1..23: mol_type = genomic RNA
ccactccaggctcctctggccct

SEQ ID NO: 1459 - RNA, 22 nt, Homo sapiens
  source 1..22: mol_type = genomic RNA
atagtgggaagctggcagattc

SEQ ID NO: 1460 - RNA, 22 nt, Homo sapiens
  source 1..22: mol_type = genomic RNA
gaatctgccagcttcccactat

SEQ ID NO: 1461 - RNA, 21 nt, Homo sapiens
  source 1..21: mol_type = genomic RNA
atctgccagcttccacagtgg

SEQ ID NO: 1462 - RNA, 21 nt, Homo sapiens
  source 1..21: mol_type = genomic RNA
ccactgtggaagctggcagat

SEQ ID NO: 1463 - RNA, 25 nt, Homo sapiens
  source 1..25: mol_type = genomic RNA
catgctgacctccctcctgccccag

SEQ ID NO: 1464 - RNA, 25 nt, Homo sapiens
  source 1..25: mol_type = genomic RNA
ctggggcaggagggaggtcagcatg

SEQ ID NO: 1465 - RNA, 23 nt, Homo sapiens
  source 1..23: mol_type = genomic RNA
tgggaggggagaggcagcaagca

SEQ ID NO: 1466 - RNA, 23 nt, Homo sapiens
  source 1..23: mol_type = genomic RNA
tgcttgctgcctctcccctccca

SEQ ID NO: 1467 - RNA, 22 nt, Homo sapiens
  source 1..22: mol_type = genomic RNA
tcatttatctgttgggaagcta

SEQ ID NO: 1468 - RNA, 22 nt, Homo sapiens
  source 1..22: mol_type = genomic RNA
tagcttcccaacagataaatga

SEQ ID NO: 1469 - RNA, 23 nt, Homo sapiens
  source 1..23: mol_type = genomic RNA
ctggcggagcccattccatgcca

SEQ ID NO: 1470 - RNA, 23 nt, Homo sapiens
  source 1..23: mol_type = genomic RNA
tggcatggaatgggctccgccag

SEQ ID NO: 1471 - RNA, 22 nt, Homo sapiens
  source 1..22: mol_type = genomic RNA
cacacaagtggcccccaacact

SEQ ID NO: 1472 - RNA, 22 nt, Homo sapiens
  source 1..22: mol_type = genomic RNA
agtgttgggggccacttgtgtg

SEQ ID NO: 1473 - RNA, 22 nt, Homo sapiens
  source 1..22: mol_type = genomic RNA
tgctgggggccacatgagtgtg

SEQ ID NO: 1474 - RNA, 22 nt, Homo sapiens
  source 1..22: mol_type = genomic RNA
cacactcatgtggcccccagca

SEQ ID NO: 1475 - RNA, 21 nt, Homo sapiens
  source 1..21: mol_type = genomic RNA
gccctgacctgtcctgttctg

SEQ ID NO: 1476 - RNA, 21 nt, Homo sapiens
  source 1..21: mol_type = genomic RNA
cagaacaggacaggtcagggc

SEQ ID NO: 1477 - RNA, 23 nt, Homo sapiens
  source 1..23: mol_type = genomic RNA
tgtagagcagggagcaggaagct

SEQ ID NO: 1478 - RNA, 23 nt, Homo sapiens
  source 1..23: mol_type = genomic RNA
agcttcctgctccctgctctaca

SEQ ID NO: 1479 - RNA, 22 nt, Homo sapiens
  source 1..22: mol_type = genomic RNA
ccaccaggtctagcattgggat

SEQ ID NO: 1480 - RNA, 22 nt, Homo sapiens
  source 1..22: mol_type = genomic RNA
atcccaatgctagacctggtgg

SEQ ID NO: 1481 - RNA, 22 nt, Homo sapiens
  source 1..22: mol_type = genomic RNA
aatcccaatgctagacccggtg

SEQ ID NO: 1482 - RNA, 22 nt, Homo sapiens
  source 1..22: mol_type = genomic RNA
caccgggtctagcattgggatt

SEQ ID NO: 1483 - RNA, 22 nt, Homo sapiens
  source 1..22: mol_type = genomic RNA
gctgcgggctgcggtcagggcg

SEQ ID NO: 1484 - RNA, 22 nt, Homo sapiens
  source 1..22: mol_type = genomic RNA
cgccctgaccgcagcccgcagc

SEQ ID NO: 1485 - RNA, 21 nt, Homo sapiens
  source 1..21: mol_type = genomic RNA
aaaggtgctcaaattagacat

SEQ ID NO: 1486 - RNA, 21 nt, Homo sapiens
  source 1..21: mol_type = genomic RNA
atgtctaatttgagcaccttt

SEQ ID NO: 1487 - RNA, 22 nt, Homo sapiens
  source 1..22: mol_type = genomic RNA
cctaatttgaacaccttcggta

SEQ ID NO: 1488 - RNA, 22 nt, Homo sapiens
  source 1..22: mol_type = genomic RNA
taccgaaggtgttcaaattagg

SEQ ID NO: 1489 - RNA, 19 nt, Homo sapiens
  source 1..19: mol_type = genomic RNA
aggcaggttatctgggctg

SEQ ID NO: 1490 - RNA, 19 nt, Homo sapiens
  source 1..19: mol_type = genomic RNA
cagcccagataacctgcct

SEQ ID NO: 1491 - RNA, 20 nt, Homo sapiens
  source 1..20: mol_type = genomic RNA
atgcgaggatgctgacagtg

SEQ ID NO: 1492 - RNA, 20 nt, Homo sapiens
  source 1..20: mol_type = genomic RNA
cactgtcagcatcctcgcat

SEQ ID NO: 1493 - RNA, 22 nt, Homo sapiens
  source 1..22: mol_type = genomic RNA
tgaaactggagcgcctggagga

SEQ ID NO: 1494 - RNA, 22 nt, Homo sapiens
  source 1..22: mol_type = genomic RNA
tcctccaggcgctccagtttca

SEQ ID NO: 1495 - RNA, 22 nt, Homo sapiens
  source 1..22: mol_type = genomic RNA
accagcgcgttttcagtttcat

SEQ ID NO: 1496 - RNA, 22 nt, Homo sapiens
  source 1..22: mol_type = genomic RNA
atgaaactgaaaacgcgctggt

SEQ ID NO: 1497 - RNA, 25 nt, Homo sapiens
  source 1..25: mol_type = genomic RNA
aagggaggaggagcggaggggccct

SEQ ID NO: 1498 - RNA, 25 nt, Homo sapiens
  source 1..25: mol_type = genomic RNA
agggcccctccgctcctcctccctt

SEQ ID NO: 1499 - RNA, 22 nt, Homo sapiens
  source 1..22: mol_type = genomic RNA
gcccgagaggatccgtccctgc

SEQ ID NO: 1500 - RNA, 22 nt, Homo sapiens
  source 1..22: mol_type = genomic RNA
gcagggacggatcctctcgggc

SEQ ID NO: 1501 - RNA, 22 nt, Homo sapiens
  source 1..22: mol_type = genomic RNA
aggactgatcctctcgggcagg

SEQ ID NO: 1502 - RNA, 22 nt, Homo sapiens
  source 1..22: mol_type = genomic RNA
cctgcccgagaggatcagtcct

SEQ ID NO: 1503 - RNA, 23 nt, Homo sapiens
  source 1..23: mol_type = genomic RNA
tcaggcaaagggatatttacaga

SEQ ID NO: 1504 - RNA, 23 nt, Homo sapiens
  source 1..23: mol_type = genomic RNA
tctgtaaatatccctttgcctga

SEQ ID NO: 1505 - RNA, 21 nt, Homo sapiens
  source 1..21: mol_type = genomic RNA
tttctgtcttttctggtccag

SEQ ID NO: 1506 - RNA, 21 nt, Homo sapiens
  source 1..21: mol_type = genomic RNA
ctggaccagaaaagacagaaa

SEQ ID NO: 1507 - RNA, 23 nt, Homo sapiens
  source 1..23: mol_type = genomic RNA
tggccggatgggacaggaggcat

SEQ ID NO: 1508 - RNA, 23 nt, Homo sapiens
  source 1..23: mol_type = genomic RNA
atgcctcctgtcccatccggcca

SEQ ID NO: 1509 - RNA, 23 nt, Homo sapiens
  source 1..23: mol_type = genomic RNA
tctaaagactagacttcgctatg

SEQ ID NO: 1510 - RNA, 23 nt, Homo sapiens
  source 1..23: mol_type = genomic RNA
catagcgaagtctagtctttaga

SEQ ID NO: 1511 - RNA, 23 nt, Homo sapiens
  source 1..23: mol_type = genomic RNA
tggcccggcgacgtctcacggtc

SEQ ID NO: 1512 - RNA, 23 nt, Homo sapiens
  source 1..23: mol_type = genomic RNA
gaccgtgagacgtcgccgggcca

SEQ ID NO: 1513 - RNA, 23 nt, Homo sapiens
  source 1..23: mol_type = genomic RNA
tgagtggggctcccgggacggcg

SEQ ID NO: 1514 - RNA, 23 nt, Homo sapiens
  source 1..23: mol_type = genomic RNA
cgccgtcccgggagccccactca

SEQ ID NO: 1515 - RNA, 21 nt, Homo sapiens
  source 1..21: mol_type = genomic RNA
agcggtgctcctgcgggccga

SEQ ID NO: 1516 - RNA, 21 nt, Homo sapiens
  source 1..21: mol_type = genomic RNA
tcggcccgcaggagcaccgct

SEQ ID NO: 1517 - RNA, 23 nt, Homo sapiens
  source 1..23: mol_type = genomic RNA
ccggtcccaggagaacctgcaga

SEQ ID NO: 1518 - RNA, 23 nt, Homo sapiens
  source 1..23: mol_type = genomic RNA
tctgcaggttctcctgggaccgg

SEQ ID NO: 1519 - RNA, 22 nt, Homo sapiens
  source 1..22: mol_type = genomic RNA
aaggcccgggctttcctcccag

SEQ ID NO: 1520 - RNA, 22 nt, Homo sapiens
  source 1..22: mol_type = genomic RNA
ctgggaggaaagcccgggcctt

SEQ ID NO: 1521 - RNA, 22 nt, Homo sapiens
  source 1..22: mol_type = genomic RNA
agggaaggaggcttggtcttag

SEQ ID NO: 1522 - RNA, 22 nt, Homo sapiens
  source 1..22: mol_type = genomic RNA
ctaagaccaagcctccttccct

SEQ ID NO: 1523 - RNA, 21 nt, Homo sapiens
  source 1..21: mol_type = genomic RNA
gaggtttggggaggatttgct

SEQ ID NO: 1524 - RNA, 21 nt, Homo sapiens
  source 1..21: mol_type = genomic RNA
agcaaatcctccccaaacctc

SEQ ID NO: 1525 - RNA, 20 nt, Homo sapiens
  source 1..20: mol_type = genomic RNA
cgcccctcctgcccccacag

SEQ ID NO: 1526 - RNA, 20 nt, Homo sapiens
  source 1..20: mol_type = genomic RNA
ctgtgggggcaggaggggcg

SEQ ID NO: 1527 - RNA, 22 nt, Homo sapiens
  source 1..22: mol_type = genomic RNA
tgcggggacaggccagggcatc

SEQ ID NO: 1528 - RNA, 22 nt, Homo sapiens
  source 1..22: mol_type = genomic RNA
gatgccctggcctgtccccgca

SEQ ID NO: 1529 - RNA, 22 nt, Homo sapiens
  source 1..22: mol_type = genomic RNA
cctgacccaccccctcccgcag

SEQ ID NO: 1530 - RNA, 22 nt, Homo sapiens
  source 1..22: mol_type = genomic RNA
ctgcgggagggggtgggtcagg

SEQ ID NO: 1531 - RNA, 22 nt, Homo sapiens
  source 1..22: mol_type = genomic RNA
ctcgggcggaggtggttgagtg

SEQ ID NO: 1532 - RNA, 22 nt, Homo sapiens
  source 1..22: mol_type = genomic RNA
cactcaaccacctccgcccgag

SEQ ID NO: 1533 - RNA, 24 nt, Homo sapiens
  source 1..24: mol_type = genomic RNA
agaggacccgtagctgctagaagg

SEQ ID NO: 1534 - RNA, 24 nt, Homo sapiens
  source 1..24: mol_type = genomic RNA
ccttctagcagctacgggtcctct

SEQ ID NO: 1535 - RNA, 22 nt, Homo sapiens
  source 1..22: mol_type = genomic RNA
ttgtggatctcaaggatgtgct

SEQ ID NO: 1536 - RNA, 22 nt, Homo sapiens
  source 1..22: mol_type = genomic RNA
agcacatccttgagatccacaa

SEQ ID NO: 1537 - RNA, 22 nt, Homo sapiens
  source 1..22: mol_type = genomic RNA
ttctctttctttagccttgtgt

SEQ ID NO: 1538 - RNA, 22 nt, Homo sapiens
  source 1..22: mol_type = genomic RNA
acacaaggctaaagaaagagaa

SEQ ID NO: 1539 - RNA, 22 nt, Homo sapiens
  source 1..22: mol_type = genomic RNA
caaggccaaaggaagagaacag

SEQ ID NO: 1540 - RNA, 22 nt, Homo sapiens
  source 1..22: mol_type = genomic RNA
ctgttctcttcctttggccttg

SEQ ID NO: 1541 - RNA, 23 nt, Homo sapiens
  source 1..23: mol_type = genomic RNA
atgcggacctgggttagcggagt

SEQ ID NO: 1542 - RNA, 23 nt, Homo sapiens
  source 1..23: mol_type = genomic RNA
actccgctaacccaggtccgcat

SEQ ID NO: 1543 - RNA, 22 nt, Homo sapiens
  source 1..22: mol_type = genomic RNA
agccaggctctgaagggaaagt

SEQ ID NO: 1544 - RNA, 22 nt, Homo sapiens
  source 1..22: mol_type = genomic RNA
actttcccttcagagcctggct

SEQ ID NO: 1545 - RNA, 22 nt, Homo sapiens
  source 1..22: mol_type = genomic RNA
tttcccttcagagcctggcttt

SEQ ID NO: 1546 - RNA, 22 nt, Homo sapiens
  source 1..22: mol_type = genomic RNA
aaagccaggctctgaagggaaa

SEQ ID NO: 1547 - RNA, 22 nt, Homo sapiens
  source 1..22: mol_type = genomic RNA
ccagagatggttgccttcctat

SEQ ID NO: 1548 - RNA, 22 nt, Homo sapiens
  source 1..22: mol_type = genomic RNA
ataggaaggcaaccatctctgg

SEQ ID NO: 1549 - RNA, 23 nt, Homo sapiens
  source 1..23: mol_type = genomic RNA
cagggaggcgctcactctctgct

SEQ ID NO: 1550 - RNA, 23 nt, Homo sapiens
  source 1..23: mol_type = genomic RNA
agcagagagtgagcgcctccctg

SEQ ID NO: 1551 - RNA, 22 nt, Homo sapiens
  source 1..22: mol_type = genomic RNA
catgacgtcacagaggcttcgc

SEQ ID NO: 1552 - RNA, 22 nt, Homo sapiens
  source 1..22: mol_type = genomic RNA
gcgaagcctctgtgacgtcatg

SEQ ID NO: 1553 - RNA, 23 nt, Homo sapiens
  source 1..23: mol_type = genomic RNA
aggcctctgtgacgtcacggtgt

SEQ ID NO: 1554 - RNA, 23 nt, Homo sapiens
  source 1..23: mol_type = genomic RNA
acaccgtgacgtcacagaggcct

SEQ ID NO: 1555 - RNA, 23 nt, Homo sapiens
  source 1..23: mol_type = genomic RNA
tgccccacctgctgaccaccctc

SEQ ID NO: 1556 - RNA, 23 nt, Homo sapiens
  source 1..23: mol_type = genomic RNA
gagggtggtcagcaggtggggca

SEQ ID NO: 1557 - RNA, 23 nt, Homo sapiens
  source 1..23: mol_type = genomic RNA
gtgagtgggagccggtggggctg

SEQ ID NO: 1558 - RNA, 23 nt, Homo sapiens
  source 1..23: mol_type = genomic RNA
cagccccaccggctcccactcac

SEQ ID NO: 1559 - RNA, 21 nt, Homo sapiens
  source 1..21: mol_type = genomic RNA
taggactagatgttggaatta

SEQ ID NO: 1560 - RNA, 21 nt, Homo sapiens
  source 1..21: mol_type = genomic RNA
taattccaacatctagtccta

SEQ ID NO: 1561 - RNA, 22 nt, Homo sapiens
  source 1..22: mol_type = genomic RNA
aaattcatgttcaatctaaacc

SEQ ID NO: 1562 - RNA, 22 nt, Homo sapiens
  source 1..22: mol_type = genomic RNA
ggtttagattgaacatgaattt

SEQ ID NO: 1563 - RNA, 22 nt, Homo sapiens
  source 1..22: mol_type = genomic RNA
tttagattgaacatgaagttag

SEQ ID NO: 1564 - RNA, 22 nt, Homo sapiens
  source 1..22: mol_type = genomic RNA
ctaacttcatgttcaatctaaa

SEQ ID NO: 1565 - RNA, 21 nt, Homo sapiens
  source 1..21: mol_type = genomic RNA
gagggcatgcgcactttgtcc

SEQ ID NO: 1566 - RNA, 21 nt, Homo sapiens
  source 1..21: mol_type = genomic RNA
ggacaaagtgcgcatgccctc

SEQ ID NO: 1567 - RNA, 21 nt, Homo sapiens
  source 1..21: mol_type = genomic RNA
acaaggtgtgcatgcctgacc

SEQ ID NO: 1568 - RNA, 21 nt, Homo sapiens
  source 1..21: mol_type = genomic RNA
ggtcaggcatgcacaccttgt

SEQ ID NO: 1569 - RNA, 22 nt, Homo sapiens
  source 1..22: mol_type = genomic RNA
cttctgatcaagatttgtggtg

SEQ ID NO: 1570 - RNA, 22 nt, Homo sapiens
  source 1..22: mol_type = genomic RNA
caccacaaatcttgatcagaag

SEQ ID NO: 1571 - RNA, 21 nt, Homo sapiens
  source 1..21: mol_type = genomic RNA
ccaaatcttgatcagaagcct

SEQ ID NO: 1572 - RNA, 21 nt, Homo sapiens
  source 1..21: mol_type = genomic RNA
aggcttctgatcaagatttgg

SEQ ID NO: 1573 - RNA, 24 nt, Homo sapiens
  source 1..24: mol_type = genomic RNA
aggcaggggctggtgctgggcggg

SEQ ID NO: 1574 - RNA, 24 nt, Homo sapiens
  source 1..24: mol_type = genomic RNA
cccgcccagcaccagcccctgcct

SEQ ID NO: 1575 - RNA, 21 nt, Homo sapiens
  source 1..21: mol_type = genomic RNA
cgcctgcccagccctcctgct

SEQ ID NO: 1576 - RNA, 21 nt, Homo sapiens
  source 1..21: mol_type = genomic RNA
agcaggagggctgggcaggcg

SEQ ID NO: 1577 - RNA, 22 nt, Homo sapiens
  source 1..22: mol_type = genomic RNA
ttaactcctttcacacccatgg

SEQ ID NO: 1578 - RNA, 22 nt, Homo sapiens
  source 1..22: mol_type = genomic RNA
ccatgggtgtgaaaggagttaa

SEQ ID NO: 1579 - RNA, 21 nt, Homo sapiens
  source 1..21: mol_type = genomic RNA
tggatgtggaaggagttatct

SEQ ID NO: 1580 - RNA, 21 nt, Homo sapiens
  source 1..21: mol_type = genomic RNA
agataactccttccacatcca

SEQ ID NO: 1581 - RNA, 22 nt, Homo sapiens
  source 1..22: mol_type = genomic RNA
tgagtgattgatagctatgttc

SEQ ID NO: 1582 - RNA, 22 nt, Homo sapiens
  source 1..22: mol_type = genomic RNA
gaacatagctatcaatcactca

SEQ ID NO: 1583 - RNA, 21 nt, Homo sapiens
  source 1..21: mol_type = genomic RNA
atagcaattgctcttttggaa

SEQ ID NO: 1584 - RNA, 21 nt, Homo sapiens
  source 1..21: mol_type = genomic RNA
ttccaaaagagcaattgctat

SEQ ID NO: 1585 - RNA, 21 nt, Homo sapiens
  source 1..21: mol_type = genomic RNA
tctgaaagagcagttggtgtt

SEQ ID NO: 1586 - RNA, 21 nt, Homo sapiens
  source 1..21: mol_type = genomic RNA
aacaccaactgctctttcaga

SEQ ID NO: 1587 - RNA, 23 nt, Homo sapiens
  source 1..23: mol_type = genomic RNA
cgcgggcgctcctggccgccgcc

SEQ ID NO: 1588 - RNA, 23 nt, Homo sapiens
  source 1..23: mol_type = genomic RNA
ggcggcggccaggagcgcccgcg

SEQ ID NO: 1589 - RNA, 20 nt, Homo sapiens
  source 1..20: mol_type = genomic RNA
ccaggagatccagagagaat

SEQ ID NO: 1590 - RNA, 20 nt, Homo sapiens
  source 1..20: mol_type = genomic RNA
attctctctggatctcctgg

SEQ ID NO: 1591 - RNA, 22 nt, Homo sapiens
  source 1..22: mol_type = genomic RNA
attctctctggatcccatggat

SEQ ID NO: 1592 - RNA, 22 nt, Homo sapiens
  source 1..22: mol_type = genomic RNA
atccatgggatccagagagaat

SEQ ID NO: 1593 - RNA, 22 nt, Homo sapiens
  source 1..22: mol_type = genomic RNA
tctgccatcctccctcccctac

SEQ ID NO: 1594 - RNA, 22 nt, Homo sapiens
  source 1..22: mol_type = genomic RNA
gtaggggagggaggatggcaga

SEQ ID NO: 1595 - RNA, 24 nt, Homo sapiens
  source 1..24: mol_type = genomic RNA
ggtgggatggagagaaggtatgag

SEQ ID NO: 1596 - RNA, 24 nt, Homo sapiens
  source 1..24: mol_type = genomic RNA
ctcataccttctctccatcccacc

SEQ ID NO: 1597 - RNA, 18 nt, Homo sapiens
  source 1..18: mol_type = genomic RNA
tgagatgacactgtagct

SEQ ID NO: 1598 - RNA, 18 nt, Homo sapiens
  source 1..18: mol_type = genomic RNA
agctacagtgtcatctca

SEQ ID NO: 1599 - RNA, 21 nt, Homo sapiens
  source 1..21: mol_type = genomic RNA
agcagacttgacctacaatta

SEQ ID NO: 1600 - RNA, 21 nt, Homo sapiens
  source 1..21: mol_type = genomic RNA
taattgtaggtcaagtctgct

SEQ ID NO: 1601 - RNA, 22 nt, Homo sapiens
  source 1..22: mol_type = genomic RNA
cagaacaggagcatagaaaggc

SEQ ID NO: 1602 - RNA, 22 nt, Homo sapiens
  source 1..22: mol_type = genomic RNA
gcctttctatgctcctgttctg

SEQ ID NO: 1603 - RNA, 22 nt, Homo sapiens
  source 1..22: mol_type = genomic RNA
ttaattttttgtttcggtcact

SEQ ID NO: 1604 - RNA, 22 nt, Homo sapiens
  source 1..22: mol_type = genomic RNA
agtgaccgaaacaaaaaattaa

SEQ ID NO: 1605 - RNA, 23 nt, Homo sapiens
  source 1..23: mol_type = genomic RNA
cttgccatcctggtccactgcat

SEQ ID NO: 1606 - RNA, 23 nt, Homo sapiens
  source 1..23: mol_type = genomic RNA
atgcagtggaccaggatggcaag

SEQ ID NO: 1607 - RNA, 22 nt, Homo sapiens
  source 1..22: mol_type = genomic RNA
gtggaccaggatggcaagggct

SEQ ID NO: 1608 - RNA, 22 nt, Homo sapiens
  source 1..22: mol_type = genomic RNA
agcccttgccatcctggtccac

SEQ ID NO: 1609 - RNA, 22 nt, Homo sapiens
  source 1..22: mol_type = genomic RNA
atacctcatctagaatgctgta

SEQ ID NO: 1610 - RNA, 22 nt, Homo sapiens
  source 1..22: mol_type = genomic RNA
tacagcattctagatgaggtat

SEQ ID NO: 1611 - RNA, 22 nt, Homo sapiens
  source 1..22: mol_type = genomic RNA
ttctagatgagagatatatata

SEQ ID NO: 1612 - RNA, 22 nt, Homo sapiens
  source 1..22: mol_type = genomic RNA
tatatatatctctcatctagaa

SEQ ID NO: 1613 - RNA, 22 nt, Homo sapiens
  source 1..22: mol_type = genomic RNA
tcttcttcctttgcagagttga

SEQ ID NO: 1614 - RNA, 22 nt, Homo sapiens
  source 1..22: mol_type = genomic RNA
tcaactctgcaaaggaagaaga

SEQ ID NO: 1615 - RNA, 22 nt, Homo sapiens
  source 1..22: mol_type = genomic RNA
aattctgtaaaggaagaagagg

SEQ ID NO: 1616 - RNA, 22 nt, Homo sapiens
  source 1..22: mol_type = genomic RNA
cctcttcttcctttacagaatt

SEQ ID NO: 1617 - RNA, 22 nt, Homo sapiens
  source 1..22: mol_type = genomic RNA
taggagggaatagtaaaagcag

SEQ ID NO: 1618 - RNA, 22 nt, Homo sapiens
  source 1..22: mol_type = genomic RNA
ctgcttttactattccctccta

SEQ ID NO: 1619 - RNA, 22 nt, Homo sapiens
  source 1..22: mol_type = genomic RNA
acccttgagcctgatccctagc

SEQ ID NO: 1620 - RNA, 22 nt, Homo sapiens
  source 1..22: mol_type = genomic RNA
gctagggatcaggctcaagggt

SEQ ID NO: 1621 - RNA, 22 nt, Homo sapiens
  source 1..22: mol_type = genomic RNA
aatgttggaatcctcgctagag

SEQ ID NO: 1622 - RNA, 22 nt, Homo sapiens
  source 1..22: mol_type = genomic RNA
ctctagcgaggattccaacatt

SEQ ID NO: 1623 - RNA, 21 nt, Homo sapiens
  source 1..21: mol_type = genomic RNA
tagcggggattccaatattgg

SEQ ID NO: 1624 - RNA, 21 nt, Homo sapiens
  source 1..21: mol_type = genomic RNA
ccaatattggaatccccgcta

SEQ ID NO: 1625 - RNA, 22 nt, Homo sapiens
  source 1..22: mol_type = genomic RNA
tgattgtcttcatatctagaac

SEQ ID NO: 1626 - RNA, 22 nt, Homo sapiens
  source 1..22: mol_type = genomic RNA
gttctagatatgaagacaatca

SEQ ID NO: 1627 - RNA, 22 nt, Homo sapiens
  source 1..22: mol_type = genomic RNA
ttctggatatgaagacaatcaa

SEQ ID NO: 1628 - RNA, 22 nt, Homo sapiens
  source 1..22: mol_type = genomic RNA
ttgattgtcttcatatccagaa

SEQ ID NO: 1629 - RNA, 23 nt, Homo sapiens
  source 1..23: mol_type = genomic RNA
ccccggtgttggggcgcgtctgc

SEQ ID NO: 1630 - RNA, 23 nt, Homo sapiens
  source 1..23: mol_type = genomic RNA
gcagacgcgccccaacaccgggg

SEQ ID NO: 1631 - RNA, 21 nt, Homo sapiens
  source 1..21: mol_type = genomic RNA
ggcgcgcccagctcccgggct

SEQ ID NO: 1632 - RNA, 21 nt, Homo sapiens
  source 1..21: mol_type = genomic RNA
agcccgggagctgggcgcgcc

SEQ ID NO: 1633 - RNA, 20 nt, Homo sapiens
  source 1..20: mol_type = genomic RNA
tgaggagatgctgggactga

SEQ ID NO: 1634 - RNA, 20 nt, Homo sapiens
  source 1..20: mol_type = genomic RNA
tcagtcccagcatctcctca

SEQ ID NO: 1635 - RNA, 21 nt, Homo sapiens
  source 1..21: mol_type = genomic RNA
agagtcggcgacgccgccagc

SEQ ID NO: 1636 - RNA, 21 nt, Homo sapiens
  source 1..21: mol_type = genomic RNA
gctggcggcgtcgccgactct

SEQ ID NO: 1637 - RNA, 22 nt, Homo sapiens
  source 1..22: mol_type = genomic RNA
tgaagccagctctggtctgggc

SEQ ID NO: 1638 - RNA, 22 nt, Homo sapiens
  source 1..22: mol_type = genomic RNA
gcccagaccagagctggcttca

SEQ ID NO: 1639 - RNA, 22 nt, Homo sapiens
  source 1..22: mol_type = genomic RNA
tgagaccaggactggatgcacc

SEQ ID NO: 1640 - RNA, 22 nt, Homo sapiens
  source 1..22: mol_type = genomic RNA
ggtgcatccagtcctggtctca

SEQ ID NO: 1641 - RNA, 24 nt, Homo sapiens
  source 1..24: mol_type = genomic RNA
gatgcgccgcccactgccccgcgc

SEQ ID NO: 1642 - RNA, 24 nt, Homo sapiens
  source 1..24: mol_type = genomic RNA
gcgcggggcagtgggcggcgcatc

SEQ ID NO: 1643 - RNA, 22 nt, Homo sapiens
  source 1..22: mol_type = genomic RNA
gcgggggtggcggcggcatccc

SEQ ID NO: 1644 - RNA, 22 nt, Homo sapiens
  source 1..22: mol_type = genomic RNA
gggatgccgccgccacccccgc

SEQ ID NO: 1645 - RNA, 22 nt, Homo sapiens
  source 1..22: mol_type = genomic RNA
ttacggaccagctaagggaggc

SEQ ID NO: 1646 - RNA, 22 nt, Homo sapiens
  source 1..22: mol_type = genomic RNA
gcctcccttagctggtccgtaa

SEQ ID NO: 1647 - RNA, 21 nt, Homo sapiens
  source 1..21: mol_type = genomic RNA
cacacatagcaggtgtatata

SEQ ID NO: 1648 - RNA, 21 nt, Homo sapiens
  source 1..21: mol_type = genomic RNA
tatatacacctgctatgtgtg

SEQ ID NO: 1649 - RNA, 22 nt, Homo sapiens
  source 1..22: mol_type = genomic RNA
gtatacacctgatatgtgtatg

SEQ ID NO: 1650 - RNA, 22 nt, Homo sapiens
  source 1..22: mol_type = genomic RNA
catacacatatcaggtgtatac

SEQ ID NO: 1651 - RNA, 22 nt, Homo sapiens
  source 1..22: mol_type = genomic RNA
tgaatggtaaagcgatgtcaca

SEQ ID NO: 1652 - RNA, 22 nt, Homo sapiens
  source 1..22: mol_type = genomic RNA
tgtgacatcgctttaccattca

SEQ ID NO: 1653 - RNA, 20 nt, Homo sapiens
  source 1..20: mol_type = genomic RNA
atcgctttaccattcatgtt

SEQ ID NO: 1654 - RNA, 20 nt, Homo sapiens
  source 1..20: mol_type = genomic RNA
aacatgaatggtaaagcgat

SEQ ID NO: 1655 - RNA, 18 nt, Homo sapiens
  source 1..18: mol_type = genomic RNA
tggatatgatgactgaaa

SEQ ID NO: 1656 - RNA, 18 nt, Homo sapiens
  source 1..18: mol_type = genomic RNA
tttcagtcatcatatcca

SEQ ID NO: 1657 - RNA, 18 nt, Homo sapiens
  source 1..18: mol_type = genomic RNA
cggtgagcgctcgctggc

SEQ ID NO: 1658 - RNA, 18 nt, Homo sapiens
  source 1..18: mol_type = genomic RNA
gccagcgagcgctcaccg

SEQ ID NO: 1659 - RNA, 23 nt, Homo sapiens
  source 1..23: mol_type = genomic RNA
tctgcactgtgagttggctggct

SEQ ID NO: 1660 - RNA, 23 nt, Homo sapiens
  source 1..23: mol_type = genomic RNA
agccagccaactcacagtgcaga

SEQ ID NO: 1661 - RNA, 24 nt, Homo sapiens
  source 1..24: mol_type = genomic RNA
acatcctgctccacagggcagagg

SEQ ID NO: 1662 - RNA, 24 nt, Homo sapiens
  source 1..24: mol_type = genomic RNA
cctctgccctgtggagcaggatgt

SEQ ID NO: 1663 - RNA, 22 nt, Homo sapiens
  source 1..22: mol_type = genomic RNA
tctggctatctcacgagactgt

SEQ ID NO: 1664 - RNA, 22 nt, Homo sapiens
  source 1..22: mol_type = genomic RNA
acagtctcgtgagatagccaga

SEQ ID NO: 1665 - RNA, 22 nt, Homo sapiens
  source 1..22: mol_type = genomic RNA
atattattagccacttctggat

SEQ ID NO: 1666 - RNA, 22 nt, Homo sapiens
  source 1..22: mol_type = genomic RNA
atccagaagtggctaataatat

SEQ ID NO: 1667 - RNA, 21 nt, Homo sapiens
  source 1..21: mol_type = genomic RNA
agaagtggctaataatattga

SEQ ID NO: 1668 - RNA, 21 nt, Homo sapiens
  source 1..21: mol_type = genomic RNA
tcaatattattagccacttct

SEQ ID NO: 1669 - RNA, 22 nt, Homo sapiens
  source 1..22: mol_type = genomic RNA
taaagtggcagagtatagacac

SEQ ID NO: 1670 - RNA, 22 nt, Homo sapiens
  source 1..22: mol_type = genomic RNA
gtgtctatactctgccacttta

SEQ ID NO: 1671 - RNA, 22 nt, Homo sapiens
  source 1..22: mol_type = genomic RNA
tgtctatactctgtcactttac

SEQ ID NO: 1672 - RNA, 22 nt, Homo sapiens
  source 1..22: mol_type = genomic RNA
gtaaagtgacagagtatagaca

SEQ ID NO: 1673 - RNA, 21 nt, Homo sapiens
  source 1..21: mol_type = genomic RNA
tctcagtaagtggcactctgt

SEQ ID NO: 1674 - RNA, 21 nt, Homo sapiens
  source 1..21: mol_type = genomic RNA
acagagtgccacttactgaga

SEQ ID NO: 1675 - RNA, 21 nt, Homo sapiens
  source 1..21: mol_type = genomic RNA
gacagagtgccacttactgaa

SEQ ID NO: 1676 - RNA, 21 nt, Homo sapiens
  source 1..21: mol_type = genomic RNA
ttcagtaagtggcactctgtc

SEQ ID NO: 1677 - RNA, 22 nt, Homo sapiens
  source 1..22: mol_type = genomic RNA
aactcacgaagtataccgaagt

SEQ ID NO: 1678 - RNA, 22 nt, Homo sapiens
  source 1..22: mol_type = genomic RNA
acttcggtatacttcgtgagtt

SEQ ID NO: 1679 - RNA, 22 nt, Homo sapiens
  source 1..22: mol_type = genomic RNA
ttcggtatactttgtgaattgg

SEQ ID NO: 1680 - RNA, 22 nt, Homo sapiens
  source 1..22: mol_type = genomic RNA
ccaattcacaaagtataccgaa

SEQ ID NO: 1681 - RNA, 22 nt, Homo sapiens
  source 1..22: mol_type = genomic RNA
actggcatgctgcatttatata

SEQ ID NO: 1682 - RNA, 22 nt, Homo sapiens
  source 1..22: mol_type = genomic RNA
tatataaatgcagcatgccagt

SEQ ID NO: 1683 - RNA, 22 nt, Homo sapiens
  source 1..22: mol_type = genomic RNA
atctaaatgcagcatgccagtc

SEQ ID NO: 1684 - RNA, 22 nt, Homo sapiens
  source 1..22: mol_type = genomic RNA
gactggcatgctgcatttagat

SEQ ID NO: 1685 - RNA, 19 nt, Homo sapiens
  source 1..19: mol_type = genomic RNA
catccgtccgtctgtccac

SEQ ID NO: 1686 - RNA, 19 nt, Homo sapiens
  source 1..19: mol_type = genomic RNA
gtggacagacggacggatg

SEQ ID NO: 1687 - RNA, 21 nt, Homo sapiens
  source 1..21: mol_type = genomic RNA
agtggaccgaggaaggaagga

SEQ ID NO: 1688 - RNA, 21 nt, Homo sapiens
  source 1..21: mol_type = genomic RNA
tccttccttcctcggtccact

SEQ ID NO: 1689 - RNA, 22 nt, Homo sapiens
  source 1..22: mol_type = genomic RNA
tacacaagaaaaccaaggctca

SEQ ID NO: 1690 - RNA, 22 nt, Homo sapiens
  source 1..22: mol_type = genomic RNA
tgagccttggttttcttgtgta

SEQ ID NO: 1691 - RNA, 21 nt, Homo sapiens
  source 1..21: mol_type = genomic RNA
taacataatagtgtggattga

SEQ ID NO: 1692 - RNA, 21 nt, Homo sapiens
  source 1..21: mol_type = genomic RNA
tcaatccacactattatgtta

SEQ ID NO: 1693 - RNA, 21 nt, Homo sapiens
  source 1..21: mol_type = genomic RNA
tgcttaaccttgccctcgaaa

SEQ ID NO: 1694 - RNA, 21 nt, Homo sapiens
  source 1..21: mol_type = genomic RNA
tttcgagggcaaggttaagca

SEQ ID NO: 1695 - RNA, 21 nt, Homo sapiens
  source 1..21: mol_type = genomic RNA
ttggacggtaaggttaagcaa

SEQ ID NO: 1696 - RNA, 21 nt, Homo sapiens
  source 1..21: mol_type = genomic RNA
ttgcttaaccttaccgtccaa

SEQ ID NO: 1697 - RNA, 21 nt, Homo sapiens
  source 1..21: mol_type = genomic RNA
aaaagcatcaggaagtaccca

SEQ ID NO: 1698 - RNA, 21 nt, Homo sapiens
  source 1..21: mol_type = genomic RNA
tgggtacttcctgatgctttt

SEQ ID NO: 1699 - RNA, 21 nt, Homo sapiens
  source 1..21: mol_type = genomic RNA
gcaggacaggcagaagtggat

SEQ ID NO: 1700 - RNA, 21 nt, Homo sapiens
  source 1..21: mol_type = genomic RNA
atccacttctgcctgtcctgc

SEQ ID NO: 1701 - RNA, 22 nt, Homo sapiens
  source 1..22: mol_type = genomic RNA
cagggctggcagtgacatgggt

SEQ ID NO: 1702 - RNA, 22 nt, Homo sapiens
  source 1..22: mol_type = genomic RNA
acccatgtcactgccagccctg

SEQ ID NO: 1703 - RNA, 22 nt, Homo sapiens
  source 1..22: mol_type = genomic RNA
atttccctgccattcccttggc

SEQ ID NO: 1704 - RNA, 22 nt, Homo sapiens
  source 1..22: mol_type = genomic RNA
gccaagggaatggcagggaaat

SEQ ID NO: 1705 - RNA, 22 nt, Homo sapiens
  source 1..22: mol_type = genomic RNA
tggcggcggtagttatgggctt

SEQ ID NO: 1706 - RNA, 22 nt, Homo sapiens
  source 1..22: mol_type = genomic RNA
aagcccataactaccgccgcca

SEQ ID NO: 1707 - RNA, 22 nt, Homo sapiens
  source 1..22: mol_type = genomic RNA
gctccctctagggtcgctcgga

SEQ ID NO: 1708 - RNA, 22 nt, Homo sapiens
  source 1..22: mol_type = genomic RNA
tccgagcgaccctagagggagc

SEQ ID NO: 1709 - RNA, 22 nt, Homo sapiens
  source 1..22: mol_type = genomic RNA
tgggaacttagtagaggtttaa

SEQ ID NO: 1710 - RNA, 22 nt, Homo sapiens
  source 1..22: mol_type = genomic RNA
ttaaacctctactaagttccca

SEQ ID NO: 1711 - RNA, 21 nt, Homo sapiens
  source 1..21: mol_type = genomic RNA
tggggctagtgatgcaggacg

SEQ ID NO: 1712 - RNA, 21 nt, Homo sapiens
  source 1..21: mol_type = genomic RNA
cgtcctgcatcactagcccca

SEQ ID NO: 1713 - RNA, 22 nt, Homo sapiens
  source 1..22: mol_type = genomic RNA
gctgacagcagggctggccgct

SEQ ID NO: 1714 - RNA, 22 nt, Homo sapiens
  source 1..22: mol_type = genomic RNA
agcggccagccctgctgtcagc

SEQ ID NO: 1715 - RNA, 21 nt, Homo sapiens
  source 1..21: mol_type = genomic RNA
attggactgctgatggcccgt

SEQ ID NO: 1716 - RNA, 21 nt, Homo sapiens
  source 1..21: mol_type = genomic RNA
acgggccatcagcagtccaat

SEQ ID NO: 1717 - RNA, 22 nt, Homo sapiens
  source 1..22: mol_type = genomic RNA
aggccatcagcagtccaatgaa

SEQ ID NO: 1718 - RNA, 22 nt, Homo sapiens
  source 1..22: mol_type = genomic RNA
ttcattggactgctgatggcct

SEQ ID NO: 1719 - RNA, 22 nt, Homo sapiens
  source 1..22: mol_type = genomic RNA
ttggacagaaaacacgcaggaa

SEQ ID NO: 1720 - RNA, 22 nt, Homo sapiens
  source 1..22: mol_type = genomic RNA
ttcctgcgtgttttctgtccaa

SEQ ID NO: 1721 - RNA, 20 nt, Homo sapiens
  source 1..20: mol_type = genomic RNA
cctgcgtgttttctgtccaa

SEQ ID NO: 1722 - RNA, 20 nt, Homo sapiens
  source 1..20: mol_type = genomic RNA
ttggacagaaaacacgcagg

SEQ ID NO: 1723 - RNA, 22 nt, Homo sapiens
  source 1..22: mol_type = genomic RNA
tgagacaggcttatgctgctat

SEQ ID NO: 1724 - RNA, 22 nt, Homo sapiens
  source 1..22: mol_type = genomic RNA
atagcagcataagcctgtctca

SEQ ID NO: 1725 - RNA, 22 nt, Homo sapiens
  source 1..22: mol_type = genomic RNA
atagcagcatgaacctgtctca

SEQ ID NO: 1726 - RNA, 22 nt, Homo sapiens
  source 1..22: mol_type = genomic RNA
tgagacaggttcatgctgctat

SEQ ID NO: 1727 - RNA, 20 nt, Homo sapiens
  source 1..20: mol_type = genomic RNA
gagacaggttcatgctgcta

SEQ ID NO: 1728 - RNA, 20 nt, Homo sapiens
  source 1..20: mol_type = genomic RNA
tagcagcatgaacctgtctc

SEQ ID NO: 1729 - RNA, 21 nt, Homo sapiens
  source 1..21: mol_type = genomic RNA
atagcagcataagcctgtctc

SEQ ID NO: 1730 - RNA, 21 nt, Homo sapiens
  source 1..21: mol_type = genomic RNA
gagacaggcttatgctgctat

SEQ ID NO: 1731 - RNA, 22 nt, Homo sapiens
  source 1..22: mol_type = genomic RNA
tgtgtggatcctggaggaggca

SEQ ID NO: 1732 - RNA, 22 nt, Homo sapiens
  source 1..22: mol_type = genomic RNA
tgcctcctccaggatccacaca

SEQ ID NO: 1733 - RNA, 22 nt, Homo sapiens
  source 1..22: mol_type = genomic RNA
agacatcaagatcagtcccaaa

SEQ ID NO: 1734 - RNA, 22 nt, Homo sapiens
  source 1..22: mol_type = genomic RNA
tttgggactgatcttgatgtct

SEQ ID NO: 1735 - RNA, 22 nt, Homo sapiens
  source 1..22: mol_type = genomic RNA
tttgggactgatcttgatgtct

SEQ ID NO: 1736 - RNA, 22 nt, Homo sapiens
  source 1..22: mol_type = genomic RNA
agacatcaagatcagtcccaaa

SEQ ID NO: 1737 - RNA, 22 nt, Homo sapiens
  source 1..22: mol_type = genomic RNA
aaggaaccagaaaatgagaagt

SEQ ID NO: 1738 - RNA, 22 nt, Homo sapiens
  source 1..22: mol_type = genomic RNA
acttctcattttctggttcctt

SEQ ID NO: 1739 - RNA, 22 nt, Homo sapiens
  source 1..22: mol_type = genomic RNA
tctggccttgacttgactcttt

SEQ ID NO: 1740 - RNA, 22 nt, Homo sapiens
  source 1..22: mol_type = genomic RNA
aaagagtcaagtcaaggccaga

SEQ ID NO: 1741 - RNA, 23 nt, Homo sapiens
  source 1..23: mol_type = genomic RNA
tcaaggccagaggtcccacagca

SEQ ID NO: 1742 - RNA, 23 nt, Homo sapiens
  source 1..23: mol_type = genomic RNA
tgctgtgggacctctggccttga

SEQ ID NO: 1743 - RNA, 21 nt, Homo sapiens
  source 1..21: mol_type = genomic RNA
actccagttttagttctcttg

SEQ ID NO: 1744 - RNA, 21 nt, Homo sapiens
  source 1..21: mol_type = genomic RNA
caagagaactaaaactggagt

SEQ ID NO: 1745 - RNA, 22 nt, Homo sapiens
  source 1..22: mol_type = genomic RNA
aagagaactgaaagtggagcct

SEQ ID NO: 1746 - RNA, 22 nt, Homo sapiens
  source 1..22: mol_type = genomic RNA
aggctccactttcagttctctt

SEQ ID NO: 1747 - RNA, 22 nt, Homo sapiens
  source 1..22: mol_type = genomic RNA
taaggggtgtatggcagatgca

SEQ ID NO: 1748 - RNA, 22 nt, Homo sapiens
  source 1..22: mol_type = genomic RNA
tgcatctgccatacacccctta

SEQ ID NO: 1749 - RNA, 21 nt, Homo sapiens
  source 1..21: mol_type = genomic RNA
tttcagataacagtattacat

SEQ ID NO: 1750 - RNA, 21 nt, Homo sapiens
  source 1..21: mol_type = genomic RNA
atgtaatactgttatctgaaa

SEQ ID NO: 1751 - RNA, 22 nt, Homo sapiens
  source 1..22: mol_type = genomic RNA
aagcaatactgttacctgaaat

SEQ ID NO: 1752 - RNA, 22 nt, Homo sapiens
  source 1..22: mol_type = genomic RNA
atttcaggtaacagtattgctt

SEQ ID NO: 1753 - RNA, 22 nt, Homo sapiens
  source 1..22: mol_type = genomic RNA
tactaactgcagattcaagtga

SEQ ID NO: 1754 - RNA, 22 nt, Homo sapiens
  source 1..22: mol_type = genomic RNA
tcacttgaatctgcagttagta

SEQ ID NO: 1755 - RNA, 21 nt, Homo sapiens
  source 1..21: mol_type = genomic RNA
attgcctaacatgtgccagaa

SEQ ID NO: 1756 - RNA, 21 nt, Homo sapiens
  source 1..21: mol_type = genomic RNA
ttctggcacatgttaggcaat

SEQ ID NO: 1757 - RNA, 22 nt, Homo sapiens
  source 1..22: mol_type = genomic RNA
tctggtatgtagtaggtaataa

SEQ ID NO: 1758 - RNA, 22 nt, Homo sapiens
  source 1..22: mol_type = genomic RNA
ttattacctactacataccaga

SEQ ID NO: 1759 - RNA, 22 nt, Homo sapiens
  source 1..22: mol_type = genomic RNA
agttgcctttttgttcccatgc

SEQ ID NO: 1760 - RNA, 22 nt, Homo sapiens
  source 1..22: mol_type = genomic RNA
gcatgggaacaaaaaggcaact

SEQ ID NO: 1761 - RNA, 21 nt, Homo sapiens
  source 1..21: mol_type = genomic RNA
ataggcaccaaaaagcaacaa

SEQ ID NO: 1762 - RNA, 21 nt, Homo sapiens
  source 1..21: mol_type = genomic RNA
ttgttgctttttggtgcctat

SEQ ID NO: 1763 - RNA, 22 nt, Homo sapiens
  source 1..22: mol_type = genomic RNA
cctgcaactttgcctgatcaga

SEQ ID NO: 1764 - RNA, 22 nt, Homo sapiens
  source 1..22: mol_type = genomic RNA
tctgatcaggcaaagttgcagg

SEQ ID NO: 1765 - RNA, 22 nt, Homo sapiens
  source 1..22: mol_type = genomic RNA
tgatcaggcaaaattgcagact

SEQ ID NO: 1766 - RNA, 22 nt, Homo sapiens
  source 1..22: mol_type = genomic RNA
agtctgcaattttgcctgatca

SEQ ID NO: 1767 - RNA, 22 nt, Homo sapiens
  source 1..22: mol_type = genomic RNA
ttgtggctggtcatgaggctaa

SEQ ID NO: 1768 - RNA, 22 nt, Homo sapiens
  source 1..22: mol_type = genomic RNA
ttagcctcatgaccagccacaa

SEQ ID NO: 1769 - RNA, 21 nt, Homo sapiens
  source 1..21: mol_type = genomic RNA
ttagtctcatgatcagacaca

SEQ ID NO: 1770 - RNA, 21 nt, Homo sapiens
  source 1..21: mol_type = genomic RNA
tgtgtctgatcatgagactaa

SEQ ID NO: 1771 - RNA, 22 nt, Homo sapiens
  source 1..22: mol_type = genomic RNA
aaagatagacaattggctaaat

SEQ ID NO: 1772 - RNA, 22 nt, Homo sapiens
  source 1..22: mol_type = genomic RNA
atttagccaattgtctatcttt

SEQ ID NO: 1773 - RNA, 22 nt, Homo sapiens
  source 1..22: mol_type = genomic RNA
ttagccaattgtccatctttag

SEQ ID NO: 1774 - RNA, 22 nt, Homo sapiens
  source 1..22: mol_type = genomic RNA
ctaaagatggacaattggctaa

SEQ ID NO: 1775 - RNA, 22 nt, Homo sapiens
  source 1..22: mol_type = genomic RNA
tctgtgagaccaaagaactact

SEQ ID NO: 1776 - RNA, 22 nt, Homo sapiens
  source 1..22: mol_type = genomic RNA
agtagttctttggtctcacaga

SEQ ID NO: 1777 - RNA, 22 nt, Homo sapiens
  source 1..22: mol_type = genomic RNA
ttgttctttggtctttcagcca

SEQ ID NO: 1778 - RNA, 22 nt, Homo sapiens
  source 1..22: mol_type = genomic RNA
tggctgaaagaccaaagaacaa

SEQ ID NO: 1779 - RNA, 23 nt, Homo sapiens
  source 1..23: mol_type = genomic RNA
cgggctgtccggaggggtcggct

SEQ ID NO: 1780 - RNA, 23 nt, Homo sapiens
  source 1..23: mol_type = genomic RNA
agccgacccctccggacagcccg

SEQ ID NO: 1781 - RNA, 23 nt, Homo sapiens
  source 1..23: mol_type = genomic RNA
tctgtattctcctttgcctgcag

SEQ ID NO: 1782 - RNA, 23 nt, Homo sapiens
  source 1..23: mol_type = genomic RNA
ctgcaggcaaaggagaatacaga

SEQ ID NO: 1783 - RNA, 23 nt, Homo sapiens
  source 1..23: mol_type = genomic RNA
tacatggatggaaaccttcaagc

SEQ ID NO: 1784 - RNA, 23 nt, Homo sapiens
  source 1..23: mol_type = genomic RNA
gcttgaaggtttccatccatgta

SEQ ID NO: 1785 - RNA, 22 nt, Homo sapiens
  source 1..22: mol_type = genomic RNA
tatggaggttctagaccatgtt

SEQ ID NO: 1786 - RNA, 22 nt, Homo sapiens
  source 1..22: mol_type = genomic RNA
aacatggtctagaacctccata

SEQ ID NO: 1787 - RNA, 22 nt, Homo sapiens
  source 1..22: mol_type = genomic RNA
gggaccatcctgcctgctgtgg

SEQ ID NO: 1788 - RNA, 22 nt, Homo sapiens
  source 1..22: mol_type = genomic RNA
ccacagcaggcaggatggtccc

SEQ ID NO: 1789 - RNA, 22 nt, Homo sapiens
  source 1..22: mol_type = genomic RNA
tcagcaggcaggctggtgcagc

SEQ ID NO: 1790 - RNA, 22 nt, Homo sapiens
  source 1..22: mol_type = genomic RNA
gctgcaccagcctgcctgctga

SEQ ID NO: 1791 - RNA, 22 nt, Homo sapiens
  source 1..22: mol_type = genomic RNA
tcacctgacctcccatgcctgt

SEQ ID NO: 1792 - RNA, 22 nt, Homo sapiens
  source 1..22: mol_type = genomic RNA
acaggcatgggaggtcaggtga

SEQ ID NO: 1793 - RNA, 22 nt, Homo sapiens
  source 1..22: mol_type = genomic RNA
caggcacgggagctcaggtgag

SEQ ID NO: 1794 - RNA, 22 nt, Homo sapiens
  source 1..22: mol_type = genomic RNA
ctcacctgagctcccgtgcctg

SEQ ID NO: 1795 - RNA, 21 nt, Homo sapiens
  source 1..21: mol_type = genomic RNA
tgagtgttgtctacgagggca

SEQ ID NO: 1796 - RNA, 21 nt, Homo sapiens
  source 1..21: mol_type = genomic RNA
tgccctcgtagacaacactca

SEQ ID NO: 1797 - RNA, 21 nt, Homo sapiens
  source 1..21: mol_type = genomic RNA
actgacaggagagcattttga

SEQ ID NO: 1798 - RNA, 21 nt, Homo sapiens
  source 1..21: mol_type = genomic RNA
tcaaaatgctctcctgtcagt

SEQ ID NO: 1799 - RNA, 22 nt, Homo sapiens
  source 1..22: mol_type = genomic RNA
tgacctgggactcggacagctg

SEQ ID NO: 1800 - RNA, 22 nt, Homo sapiens
  source 1..22: mol_type = genomic RNA
cagctgtccgagtcccaggtca

SEQ ID NO: 1801 - RNA, 22 nt, Homo sapiens
  source 1..22: mol_type = genomic RNA
tctcaggagtaaagacagagtt

SEQ ID NO: 1802 - RNA, 22 nt, Homo sapiens
  source 1..22: mol_type = genomic RNA
aactctgtctttactcctgaga

SEQ ID NO: 1803 - RNA, 22 nt, Homo sapiens
  source 1..22: mol_type = genomic RNA
aactctgtcttcactcatgagt

SEQ ID NO: 1804 - RNA, 22 nt, Homo sapiens
  source 1..22: mol_type = genomic RNA
actcatgagtgaagacagagtt

SEQ ID NO: 1805 - RNA, 22 nt, Homo sapiens
  source 1..22: mol_type = genomic RNA
tggggcggagcttccggaggcc

SEQ ID NO: 1806 - RNA, 22 nt, Homo sapiens
  source 1..22: mol_type = genomic RNA
ggcctccggaagctccgcccca

SEQ ID NO: 1807 - RNA, 22 nt, Homo sapiens
  source 1..22: mol_type = genomic RNA
caatcagcaagtatactgccct

SEQ ID NO: 1808 - RNA, 22 nt, Homo sapiens
  source 1..22: mol_type = genomic RNA
agggcagtatacttgctgattg

SEQ ID NO: 1809 - RNA, 22 nt, Homo sapiens
  source 1..22: mol_type = genomic RNA
tggcagtgtcttagctggttgt

SEQ ID NO: 1810 - RNA, 22 nt, Homo sapiens
  source 1..22: mol_type = genomic RNA
acaaccagctaagacactgcca

SEQ ID NO: 1811 - RNA, 22 nt, Homo sapiens
  source 1..22: mol_type = genomic RNA
ccaatattggctgtgctgctcc

SEQ ID NO: 1812 - RNA, 22 nt, Homo sapiens
  source 1..22: mol_type = genomic RNA
ggagcagcacagccaatattgg

SEQ ID NO: 1813 - RNA, 21 nt, Homo sapiens
  source 1..21: mol_type = genomic RNA
tagcagcacagaaatattggc

SEQ ID NO: 1814 - RNA, 21 nt, Homo sapiens
  source 1..21: mol_type = genomic RNA
gccaatatttctgtgctgcta

SEQ ID NO: 1815 - RNA, 21 nt, Homo sapiens
  source 1..21: mol_type = genomic RNA
taattttatgtataagctagt

SEQ ID NO: 1816 - RNA, 21 nt, Homo sapiens
  source 1..21: mol_type = genomic RNA
actagcttatacataaaatta

SEQ ID NO: 1817 - RNA, 22 nt, Homo sapiens
  source 1..22: mol_type = genomic RNA
gagcttattcataaaagtgcag

SEQ ID NO: 1818 - RNA, 22 nt, Homo sapiens
  source 1..22: mol_type = genomic RNA
ctgcacttttatgaataagctc

SEQ ID NO: 1819 - RNA, 22 nt, Homo sapiens
  source 1..22: mol_type = genomic RNA
aagacgggaggaaagaagggag

SEQ ID NO: 1820 - RNA, 22 nt, Homo sapiens
  source 1..22: mol_type = genomic RNA
ctcccttctttcctcccgtctt

SEQ ID NO: 1821 - RNA, 22 nt, Homo sapiens
  source 1..22: mol_type = genomic RNA
cagtggttttaccctatggtag

SEQ ID NO: 1822 - RNA, 22 nt, Homo sapiens
  source 1..22: mol_type = genomic RNA
ctaccatagggtaaaaccactg

SEQ ID NO: 1823 - RNA, 22 nt, Homo sapiens
  source 1..22: mol_type = genomic RNA
attctaatttctccacgtcttt

SEQ ID NO: 1824 - RNA, 22 nt, Homo sapiens
  source 1..22: mol_type = genomic RNA
aaagacgtggagaaattagaat

SEQ ID NO: 1825 - RNA, 22 nt, Homo sapiens
  source 1..22: mol_type = genomic RNA
aaccagcaccccaactttggac

SEQ ID NO: 1826 - RNA, 22 nt, Homo sapiens
  source 1..22: mol_type = genomic RNA
gtccaaagttggggtgctggtt

SEQ ID NO: 1827 - RNA, 24 nt, Homo sapiens
  source 1..24: mol_type = genomic RNA
aaagacataggatagagtcacctc

SEQ ID NO: 1828 - RNA, 24 nt, Homo sapiens
  source 1..24: mol_type = genomic RNA
gaggtgactctatcctatgtcttt

SEQ ID NO: 1829 - RNA, 22 nt, Homo sapiens
  source 1..22: mol_type = genomic RNA
taactggttgaacaactgaacc

SEQ ID NO: 1830 - RNA, 22 nt, Homo sapiens
  source 1..22: mol_type = genomic RNA
ggttcagttgttcaaccagtta

SEQ ID NO: 1831 - RNA, 20 nt, Homo sapiens
  source 1..20: mol_type = genomic RNA
cgtgccacccttttccccag

SEQ ID NO: 1832 - RNA, 20 nt, Homo sapiens
  source 1..20: mol_type = genomic RNA
ctggggaaaagggtggcacg

SEQ ID NO: 1833 - RNA, 17 nt, Homo sapiens
  source 1..17: mol_type = genomic RNA
gtggggccaggcggtgg

SEQ ID NO: 1834 - RNA, 17 nt, Homo sapiens
  source 1..17: mol_type = genomic RNA
ccaccgcctggccccac

SEQ ID NO: 1835 - RNA, 22 nt, Homo sapiens
  source 1..22: mol_type = genomic RNA
aaaagctgggttgagagggcaa

SEQ ID NO: 1836 - RNA, 22 nt, Homo sapiens
  source 1..22: mol_type = genomic RNA
ttgccctctcaacccagctttt

SEQ ID NO: 1837 - RNA, 22 nt, Homo sapiens
  source 1..22: mol_type = genomic RNA
ggtccagaggggagataggttc

SEQ ID NO: 1838 - RNA, 22 nt, Homo sapiens
  source 1..22: mol_type = genomic RNA
gaacctatctcccctctggacc

SEQ ID NO: 1839 - RNA, 23 nt, Homo sapiens
  source 1..23: mol_type = genomic RNA
tagccttcagatcttggtgtttt

SEQ ID NO: 1840 - RNA, 23 nt, Homo sapiens
  source 1..23: mol_type = genomic RNA
aaaacaccaagatctgaaggcta

SEQ ID NO: 1841 - RNA, 23 nt, Homo sapiens
  source 1..23: mol_type = genomic RNA
ccacttggatctgaaggctgccc

SEQ ID NO: 1842 - RNA, 23 nt, Homo sapiens
  source 1..23: mol_type = genomic RNA
gggcagccttcagatccaagtgg

SEQ ID NO: 1843 - RNA, 22 nt, Homo sapiens
  source 1..22: mol_type = genomic RNA
tgtgcgcagggagacctctccc

SEQ ID NO: 1844 - RNA, 22 nt, Homo sapiens
  source 1..22: mol_type = genomic RNA
gggagaggtctccctgcgcaca

SEQ ID NO: 1845 - RNA, 22 nt, Homo sapiens
  source 1..22: mol_type = genomic RNA
tgtctactactggagacactgg

SEQ ID NO: 1846 - RNA, 22 nt, Homo sapiens
  source 1..22: mol_type = genomic RNA
ccagtgtctccagtagtagaca

SEQ ID NO: 1847 - RNA, 21 nt, Homo sapiens
  source 1..21: mol_type = genomic RNA
aaggcagggcccccgctcccc

SEQ ID NO: 1848 - RNA, 21 nt, Homo sapiens
  source 1..21: mol_type = genomic RNA
ggggagcgggggccctgcctt

SEQ ID NO: 1849 - RNA, 21 nt, Homo sapiens
  source 1..21: mol_type = genomic RNA
ctgactgttgccgtcctccag

SEQ ID NO: 1850 - RNA, 21 nt, Homo sapiens
  source 1..21: mol_type = genomic RNA
ctggaggacggcaacagtcag

SEQ ID NO: 1851 - RNA, 25 nt, Homo sapiens
  source 1..25: mol_type = genomic RNA
aaaaaccacaattacttttgcacca

SEQ ID NO: 1852 - RNA, 25 nt, Homo sapiens
  source 1..25: mol_type = genomic RNA
tggtgcaaaagtaattgtggttttt

SEQ ID NO: 1853 - RNA, 23 nt, Homo sapiens
  source 1..23: mol_type = genomic RNA
caaaaaccgcaattacttttgca

SEQ ID NO: 1854 - RNA, 23 nt, Homo sapiens
  source 1..23: mol_type = genomic RNA
tgcaaaagtaattgcggtttttg

SEQ ID NO: 1855 - RNA, 22 nt, Homo sapiens
  source 1..22: mol_type = genomic RNA
atgtgcctgagggagtaagaca

SEQ ID NO: 1856 - RNA, 22 nt, Homo sapiens
  source 1..22: mol_type = genomic RNA
tgtcttactccctcaggcacat

SEQ ID NO: 1857 - RNA, 20 nt, Homo sapiens
  source 1..20: mol_type = genomic RNA
tcttactccctcaggcactg

SEQ ID NO: 1858 - RNA, 20 nt, Homo sapiens
  source 1..20: mol_type = genomic RNA
cagtgcctgagggagtaaga

SEQ ID NO: 1859 - RNA, 22 nt, Homo sapiens
  source 1..22: mol_type = genomic RNA
agacacatttggagagggaccc

SEQ ID NO: 1860 - RNA, 22 nt, Homo sapiens
  source 1..22: mol_type = genomic RNA
gggtccctctccaaatgtgtct

SEQ ID NO: 1861 - RNA, 22 nt, Homo sapiens
  source 1..22: mol_type = genomic RNA
ggttccctctccaaatgtgtct

SEQ ID NO: 1862 - RNA, 22 nt, Homo sapiens
  source 1..22: mol_type = genomic RNA
agacacatttggagagggaacc

SEQ ID NO: 1863 - RNA, 21 nt, Homo sapiens
  source 1..21: mol_type = genomic RNA
aaaatttctttcactacttag

SEQ ID NO: 1864 - RNA, 21 nt, Homo sapiens
  source 1..21: mol_type = genomic RNA
ctaagtagtgaaagaaatttt

SEQ ID NO: 1865 - RNA, 21 nt, Homo sapiens
  source 1..21: mol_type = genomic RNA
ttagtgaaggctattttaatt

SEQ ID NO: 1866 - RNA, 21 nt, Homo sapiens
  source 1..21: mol_type = genomic RNA
aattaaaatagccttcactaa

SEQ ID NO: 1867 - RNA, 20 nt, Homo sapiens
  source 1..20: mol_type = genomic RNA
actgtaaacgctttctgatg

SEQ ID NO: 1868 - RNA, 20 nt, Homo sapiens
  source 1..20: mol_type = genomic RNA
catcagaaagcgtttacagt

SEQ ID NO: 1869 - RNA, 22 nt, Homo sapiens
  source 1..22: mol_type = genomic RNA
gcatgtgatgaagcaaatcagt

SEQ ID NO: 1870 - RNA, 22 nt, Homo sapiens
  source 1..22: mol_type = genomic RNA
actgatttgcttcatcacatgc

SEQ ID NO: 1871 - RNA, 24 nt, Homo sapiens
  source 1..24: mol_type = genomic RNA
caaagtgatgagtaatactggctg

SEQ ID NO: 1872 - RNA, 24 nt, Homo sapiens
  source 1..24: mol_type = genomic RNA
cagccagtattactcatcactttg

SEQ ID NO: 1873 - RNA, 20 nt, Homo sapiens
  source 1..20: mol_type = genomic RNA
gaatcggaaaggaggcgccg

SEQ ID NO: 1874 - RNA, 20 nt, Homo sapiens
  source 1..20: mol_type = genomic RNA
cggcgcctcctttccgattc

SEQ ID NO: 1875 - RNA, 21 nt, Homo sapiens
  source 1..21: mol_type = genomic RNA
ttgtgaagaaagaaattctta

SEQ ID NO: 1876 - RNA, 21 nt, Homo sapiens
  source 1..21: mol_type = genomic RNA
taagaatttctttcttcacaa

SEQ ID NO: 1877 - RNA, 22 nt, Homo sapiens
  source 1..22: mol_type = genomic RNA
aggaggcatcttgagaaatgga

SEQ ID NO: 1878 - RNA, 22 nt, Homo sapiens
  source 1..22: mol_type = genomic RNA
tccatttctcaagatgcctcct

SEQ ID NO: 1879 - RNA, 24 nt, Homo sapiens
  source 1..24: mol_type = genomic RNA
acaaaaaaaaaagcccaacccttc

SEQ ID NO: 1880 - RNA, 24 nt, Homo sapiens
  source 1..24: mol_type = genomic RNA
gaagggttgggcttttttttttgt

SEQ ID NO: 1881 - RNA, 22 nt, Homo sapiens
  source 1..22: mol_type = genomic RNA
tgttgtacttttttttttgttc

SEQ ID NO: 1882 - RNA, 22 nt, Homo sapiens
  source 1..22: mol_type = genomic RNA
gaacaaaaaaaaaagtacaaca

SEQ ID NO: 1883 - RNA, 21 nt, Homo sapiens
  source 1..21: mol_type = genomic RNA
tctctcggctcctcgcggctc

SEQ ID NO: 1884 - RNA, 21 nt, Homo sapiens
  source 1..21: mol_type = genomic RNA
gagccgcgaggagccgagaga

SEQ ID NO: 1885 - RNA, 23 nt, Homo sapiens
  source 1..23: mol_type = genomic RNA
cgagggcatttcatgatgcaggc

SEQ ID NO: 1886 - RNA, 23 nt, Homo sapiens
  source 1..23: mol_type = genomic RNA
gcctgcatcatgaaatgccctcg

SEQ ID NO: 1887 - RNA, 22 nt, Homo sapiens
  source 1..22: mol_type = genomic RNA
atgaagtgcactcatgatatgt

SEQ ID NO: 1888 - RNA, 22 nt, Homo sapiens
  source 1..22: mol_type = genomic RNA
acatatcatgagtgcacttcat

SEQ ID NO: 1889 - RNA, 22 nt, Homo sapiens
  source 1..22: mol_type = genomic RNA
tgtctacattaatgaaaagagc

SEQ ID NO: 1890 - RNA, 22 nt, Homo sapiens
  source 1..22: mol_type = genomic RNA
gctcttttcattaatgtagaca

SEQ ID NO: 1891 - RNA, 22 nt, Homo sapiens
  source 1..22: mol_type = genomic RNA
tcaccctgcatcccgcacccag

SEQ ID NO: 1892 - RNA, 22 nt, Homo sapiens
  source 1..22: mol_type = genomic RNA
ctgggtgcgggatgcagggtga

SEQ ID NO: 1893 - RNA, 22 nt, Homo sapiens
  source 1..22: mol_type = genomic RNA
gtgggctgggctgggctgggcc

SEQ ID NO: 1894 - RNA, 22 nt, Homo sapiens
  source 1..22: mol_type = genomic RNA
ggcccagcccagcccagcccac

SEQ ID NO: 1895 - RNA, 20 nt, Homo sapiens
  source 1..20: mol_type = genomic RNA
cgcgggtcggggtctgcagg

SEQ ID NO: 1896 - RNA, 20 nt, Homo sapiens
  source 1..20: mol_type = genomic RNA
cctgcagaccccgacccgcg

SEQ ID NO: 1897 - RNA, 21 nt, Homo sapiens
  source 1..21: mol_type = genomic RNA
tcacctgagctcccgtgcctg

SEQ ID NO: 1898 - RNA, 21 nt, Homo sapiens
  source 1..21: mol_type = genomic RNA
caggcacgggagctcaggtga

SEQ ID NO: 1899 - RNA, 20 nt, Homo sapiens
  source 1..20: mol_type = genomic RNA
aggcatgggaggtcaggtga

SEQ ID NO: 1900 - RNA, 20 nt, Homo sapiens
  source 1..20: mol_type = genomic RNA
tcacctgacctcccatgcct

SEQ ID NO: 1901 - RNA, 23 nt, Homo sapiens
  source 1..23: mol_type = genomic RNA
catcagcaccctatgtcctttct

SEQ ID NO: 1902 - RNA, 23 nt, Homo sapiens
  source 1..23: mol_type = genomic RNA
agaaaggacatagggtgctgatg

SEQ ID NO: 1903 - RNA, 22 nt, Homo sapiens
  source 1..22: mol_type = genomic RNA
aaagacatagttgcaagatggg

SEQ ID NO: 1904 - RNA, 22 nt, Homo sapiens
  source 1..22: mol_type = genomic RNA
cccatcttgcaactatgtcttt

SEQ ID NO: 1905 - RNA, 22 nt, Homo sapiens
  source 1..22: mol_type = genomic RNA
tttgtgacctggtccactaacc

SEQ ID NO: 1906 - RNA, 22 nt, Homo sapiens
  source 1..22: mol_type = genomic RNA
ggttagtggaccaggtcacaaa

SEQ ID NO: 1907 - RNA, 22 nt, Homo sapiens
  source 1..22: mol_type = genomic RNA
gatggttgaccagagagcacac

SEQ ID NO: 1908 - RNA, 22 nt, Homo sapiens
  source 1..22: mol_type = genomic RNA
gtgtgctctctggtcaaccatc

SEQ ID NO: 1909 - RNA, 20 nt, Homo sapiens
  source 1..20: mol_type = genomic RNA
aaaagctgggttgagagggt

SEQ ID NO: 1910 - RNA, 20 nt, Homo sapiens
  source 1..20: mol_type = genomic RNA
accctctcaacccagctttt

SEQ ID NO: 1911 - RNA, 21 nt, Homo sapiens
  source 1..21: mol_type = genomic RNA
cacaaggtattggtattacct

SEQ ID NO: 1912 - RNA, 21 nt, Homo sapiens
  source 1..21: mol_type = genomic RNA
aggtaataccaataccttgtg

SEQ ID NO: 1913 - RNA, 22 nt, Homo sapiens
  source 1..22: mol_type = genomic RNA
tagtaccagtaccttgtgttca

SEQ ID NO: 1914 - RNA, 22 nt, Homo sapiens
  source 1..22: mol_type = genomic RNA
tgaacacaaggtactggtacta

SEQ ID NO: 1915 - RNA, 22 nt, Homo sapiens
  source 1..22: mol_type = genomic RNA
agtattctgtaccagggaaggt

SEQ ID NO: 1916 - RNA, 22 nt, Homo sapiens
  source 1..22: mol_type = genomic RNA
accttccctggtacagaatact

SEQ ID NO: 1917 - RNA, 22 nt, Homo sapiens
  source 1..22: mol_type = genomic RNA
tggcagtgtattgttagctggt

SEQ ID NO: 1918 - RNA, 22 nt, Homo sapiens
  source 1..22: mol_type = genomic RNA
accagctaacaatacactgcca

SEQ ID NO: 1919 - RNA, 22 nt, Homo sapiens
  source 1..22: mol_type = genomic RNA
tatacaagggcaagctctctgt

SEQ ID NO: 1920 - RNA, 22 nt, Homo sapiens
  source 1..22: mol_type = genomic RNA
acagagagcttgcccttgtata

SEQ ID NO: 1921 - RNA, 22 nt, Homo sapiens
  source 1..22: mol_type = genomic RNA
agcgaggttgccctttgtatat

SEQ ID NO: 1922 - RNA, 22 nt, Homo sapiens
  source 1..22: mol_type = genomic RNA
atatacaaagggcaacctcgct

SEQ ID NO: 1923 - RNA, 22 nt, Homo sapiens
  source 1..22: mol_type = genomic RNA
caatcactaactccactgccat

SEQ ID NO: 1924 - RNA, 22 nt, Homo sapiens
  source 1..22: mol_type = genomic RNA
atggcagtggagttagtgattg

SEQ ID NO: 1925 - RNA, 23 nt, Homo sapiens
  source 1..23: mol_type = genomic RNA
taggcagtgtcattagctgattg

SEQ ID NO: 1926 - RNA, 23 nt, Homo sapiens
  source 1..23: mol_type = genomic RNA
caatcagctaatgacactgccta

SEQ ID NO: 1927 - RNA, 22 nt, Homo sapiens
  source 1..22: mol_type = genomic RNA
cagccacaactaccctgccact

SEQ ID NO: 1928 - RNA, 22 nt, Homo sapiens
  source 1..22: mol_type = genomic RNA
agtggcagggtagttgtggctg

SEQ ID NO: 1929 - RNA, 22 nt, Homo sapiens
  source 1..22: mol_type = genomic RNA
aggcagtgtattgttagctggc

SEQ ID NO: 1930 - RNA, 22 nt, Homo sapiens
  source 1..22: mol_type = genomic RNA
gccagctaacaatacactgcct

SEQ ID NO: 1931 - RNA, 22 nt, Homo sapiens
  source 1..22: mol_type = genomic RNA
aatcactaaccacacggccagg

SEQ ID NO: 1932 - RNA, 22 nt, Homo sapiens
  source 1..22: mol_type = genomic RNA
cctggccgtgtggttagtgatt

SEQ ID NO: 1933 - RNA, 23 nt, Homo sapiens
  source 1..23: mol_type = genomic RNA
aggcagtgtagttagctgattgc

SEQ ID NO: 1934 - RNA, 23 nt, Homo sapiens
  source 1..23: mol_type = genomic RNA
gcaatcagctaactacactgcct

SEQ ID NO: 1935 - RNA, 20 nt, Homo sapiens
  source 1..20: mol_type = genomic RNA
gtccgctcggcggtggccca

SEQ ID NO: 1936 - RNA, 20 nt, Homo sapiens
  source 1..20: mol_type = genomic RNA
tgggccaccgccgagcggac

SEQ ID NO: 1937 - RNA, 23 nt, Homo sapiens
  source 1..23: mol_type = genomic RNA
gaacgcctgttcttgccaggtgg

SEQ ID NO: 1938 - RNA, 23 nt, Homo sapiens
  source 1..23: mol_type = genomic RNA
ccacctggcaagaacaggcgttc

SEQ ID NO: 1939 - RNA, 19 nt, Homo sapiens
  source 1..19: mol_type = genomic RNA
aagtgtgcagggcactggt

SEQ ID NO: 1940 - RNA, 19 nt, Homo sapiens
  source 1..19: mol_type = genomic RNA
accagtgccctgcacactt

SEQ ID NO: 1941 - RNA, 21 nt, Homo sapiens
  source 1..21: mol_type = genomic RNA
aggggtgctatctgtgattga

SEQ ID NO: 1942 - RNA, 21 nt, Homo sapiens
  source 1..21: mol_type = genomic RNA
tcaatcacagatagcacccct

SEQ ID NO: 1943 - RNA, 22 nt, Homo sapiens
  source 1..22: mol_type = genomic RNA
ctttcagtcagatgtttgctgc

SEQ ID NO: 1944 - RNA, 22 nt, Homo sapiens
  source 1..22: mol_type = genomic RNA
gcagcaaacatctgactgaaag

SEQ ID NO: 1945 - RNA, 22 nt, Homo sapiens
  source 1..22: mol_type = genomic RNA
tgtaaacatccccgactggaag

SEQ ID NO: 1946 - RNA, 22 nt, Homo sapiens
  source 1..22: mol_type = genomic RNA
cttccagtcggggatgtttaca

SEQ ID NO: 1947 - RNA, 22 nt, Homo sapiens
  source 1..22: mol_type = genomic RNA
tgtaaacatcctcgactggaag

SEQ ID NO: 1948 - RNA, 22 nt, Homo sapiens
  source 1..22: mol_type = genomic RNA
cttccagtcgaggatgtttaca

SEQ ID NO: 1949 - RNA, 22 nt, Homo sapiens
  source 1..22: mol_type = genomic RNA
agaagtaattgcggttttgcca

SEQ ID NO: 1950 - RNA, 22 nt, Homo sapiens
  source 1..22: mol_type = genomic RNA
tggcaaaaccgcaattacttct

SEQ ID NO: 1951 - RNA, 22 nt, Homo sapiens
  source 1..22: mol_type = genomic RNA
caaaactggcaattacttttgc

SEQ ID NO: 1952 - RNA, 22 nt, Homo sapiens
  source 1..22: mol_type = genomic RNA
gcaaaagtaattgccagttttg

SEQ ID NO: 1953 - RNA, 22 nt, Homo sapiens
  source 1..22: mol_type = genomic RNA
aaaagtaattgcgagttttacc

SEQ ID NO: 1954 - RNA, 22 nt, Homo sapiens
  source 1..22: mol_type = genomic RNA
ggtaaaactcgcaattactttt

SEQ ID NO: 1955 - RNA, 22 nt, Homo sapiens
  source 1..22: mol_type = genomic RNA
caagaacctcagttgcttttgt

SEQ ID NO: 1956 - RNA, 22 nt, Homo sapiens
  source 1..22: mol_type = genomic RNA
acaaaagcaactgaggttcttg

SEQ ID NO: 1957 - RNA, 22 nt, Homo sapiens
  source 1..22: mol_type = genomic RNA
caaaaatctcaattacttttgc

SEQ ID NO: 1958 - RNA, 22 nt, Homo sapiens
  source 1..22: mol_type = genomic RNA
gcaaaagtaattgagatttttg

SEQ ID NO: 1959 - RNA, 22 nt, Homo sapiens
  source 1..22: mol_type = genomic RNA
caaaaaccacagtttcttttgc

SEQ ID NO: 1960 - RNA, 22 nt, Homo sapiens
  source 1..22: mol_type = genomic RNA
gcaaaagaaactgtggtttttg

SEQ ID NO: 1961 - RNA, 22 nt, Homo sapiens
  source 1..22: mol_type = genomic RNA
aaaagtaattgtggtttttgcc

SEQ ID NO: 1962 - RNA, 22 nt, Homo sapiens
  source 1..22: mol_type = genomic RNA
ggcaaaaaccacaattactttt

SEQ ID NO: 1963 - RNA, 21 nt, Homo sapiens
  source 1..21: mol_type = genomic RNA
tgacaactatggatgagctct

SEQ ID NO: 1964 - RNA, 21 nt, Homo sapiens
  source 1..21: mol_type = genomic RNA
agagctcatccatagttgtca

SEQ ID NO: 1965 - RNA, 21 nt, Homo sapiens
  source 1..21: mol_type = genomic RNA
aacaggtgactggttagacaa

SEQ ID NO: 1966 - RNA, 21 nt, Homo sapiens
  source 1..21: mol_type = genomic RNA
ttgtctaaccagtcacctgtt

SEQ ID NO: 1967 - RNA, 21 nt, Homo sapiens
  source 1..21: mol_type = genomic RNA
aaaacggtgagattttgtttt

SEQ ID NO: 1968 - RNA, 21 nt, Homo sapiens
  source 1..21: mol_type = genomic RNA
aaaacaaaatctcaccgtttt

SEQ ID NO: 1969 - RNA, 21 nt, Homo sapiens
  source 1..21: mol_type = genomic RNA
gctagtcctgactcagccagt

SEQ ID NO: 1970 - RNA, 21 nt, Homo sapiens
  source 1..21: mol_type = genomic RNA
actggctgagtcaggactagc

SEQ ID NO: 1971 - RNA, 21 nt, Homo sapiens
  source 1..21: mol_type = genomic RNA
agggtaagctgaacctctgat

SEQ ID NO: 1972 - RNA, 21 nt, Homo sapiens
  source 1..21: mol_type = genomic RNA
atcagaggttcagcttaccct

SEQ ID NO: 1973 - RNA, 22 nt, Homo sapiens
  source 1..22: mol_type = genomic RNA
atattaccattagctcatcttt

SEQ ID NO: 1974 - RNA, 22 nt, Homo sapiens
  source 1..22: mol_type = genomic RNA
aaagatgagctaatggtaatat

SEQ ID NO: 1975 - RNA, 22 nt, Homo sapiens
  source 1..22: mol_type = genomic RNA
gatgagctcattgtaatatgag

SEQ ID NO: 1976 - RNA, 22 nt, Homo sapiens
  source 1..22: mol_type = genomic RNA
ctcatattacaatgagctcatc

SEQ ID NO: 1977 - RNA, 19 nt, Homo sapiens
  source 1..19: mol_type = genomic RNA
aggttgacatacgtttccc

SEQ ID NO: 1978 - RNA, 19 nt, Homo sapiens
  source 1..19: mol_type = genomic RNA
gggaaacgtatgtcaacct

SEQ ID NO: 1979 - RNA, 20 nt, Homo sapiens
  source 1..20: mol_type = genomic RNA
atgtataaatgtatacacac

SEQ ID NO: 1980 - RNA, 20 nt, Homo sapiens
  source 1..20: mol_type = genomic RNA
gtgtgtatacatttatacat

SEQ ID NO: 1981 - RNA, 24 nt, Homo sapiens
  source 1..24: mol_type = genomic RNA
ctgaagtgatgtgtaactgatcag

SEQ ID NO: 1982 - RNA, 24 nt, Homo sapiens
  source 1..24: mol_type = genomic RNA
ctgatcagttacacatcacttcag

SEQ ID NO: 1983 - RNA, 22 nt, Homo sapiens
  source 1..22: mol_type = genomic RNA
aagatgtggaaaaattggaatc

SEQ ID NO: 1984 - RNA, 22 nt, Homo sapiens
  source 1..22: mol_type = genomic RNA
gattccaatttttccacatctt

SEQ ID NO: 1985 - RNA, 21 nt, Homo sapiens
  source 1..21: mol_type = genomic RNA
tagataaaatattggtacctg

SEQ ID NO: 1986 - RNA, 21 nt, Homo sapiens
  source 1..21: mol_type = genomic RNA
caggtaccaatattttatcta

SEQ ID NO: 1987 - RNA, 21 nt, Homo sapiens
  source 1..21: mol_type = genomic RNA
cttcttgtgctctaggattgt

SEQ ID NO: 1988 - RNA, 21 nt, Homo sapiens
  source 1..21: mol_type = genomic RNA
acaatcctagagcacaagaag

SEQ ID NO: 1989 - RNA, 22 nt, Homo sapiens
  source 1..22: mol_type = genomic RNA
tatgcattgtatttttaggtcc

SEQ ID NO: 1990 - RNA, 22 nt, Homo sapiens
  source 1..22: mol_type = genomic RNA
ggacctaaaaatacaatgcata

SEQ ID NO: 1991 - RNA, 21 nt, Homo sapiens
  source 1..21: mol_type = genomic RNA
tttccataggtgatgagtcac

SEQ ID NO: 1992 - RNA, 21 nt, Homo sapiens
  source 1..21: mol_type = genomic RNA
gtgactcatcacctatggaaa

SEQ ID NO: 1993 - RNA, 21 nt, Homo sapiens
  source 1..21: mol_type = genomic RNA
ttggccacaatgggttagaac

SEQ ID NO: 1994 - RNA, 21 nt, Homo sapiens
  source 1..21: mol_type = genomic RNA
gttctaacccattgtggccaa

SEQ ID NO: 1995 - RNA, 22 nt, Homo sapiens
  source 1..22: mol_type = genomic RNA
tgtgtcactcgatgaccactgt

SEQ ID NO: 1996 - RNA, 22 nt, Homo sapiens
  source 1..22: mol_type = genomic RNA
acagtggtcatcgagtgacaca

SEQ ID NO: 1997 - RNA, 23 nt, Homo sapiens
  source 1..23: mol_type = genomic RNA
acttacagacaagagccttgctc

SEQ ID NO: 1998 - RNA, 23 nt, Homo sapiens
  source 1..23: mol_type = genomic RNA
gagcaaggctcttgtctgtaagt

SEQ ID NO: 1999 - RNA, 19 nt, Homo sapiens
  source 1..19: mol_type = genomic RNA
aggctgcggaattcaggac

SEQ ID NO: 2000 - RNA, 19 nt, Homo sapiens
  source 1..19: mol_type = genomic RNA
gtcctgaattccgcagcct

SEQ ID NO: 2001 - RNA, 23 nt, Homo sapiens
  source 1..23: mol_type = genomic RNA
taaatcccatggtgccttctcct

SEQ ID NO: 2002 - RNA, 23 nt, Homo sapiens
  source 1..23: mol_type = genomic RNA
aggagaaggcaccatgggattta

SEQ ID NO: 2003 - RNA, 21 nt, Homo sapiens
  source 1..21: mol_type = genomic RNA
aaactactgaaaatcaaagat

SEQ ID NO: 2004 - RNA, 21 nt, Homo sapiens
  source 1..21: mol_type = genomic RNA
atctttgattttcagtagttt

SEQ ID NO: 2005 - RNA, 21 nt, Homo sapiens
  source 1..21: mol_type = genomic RNA
gttcaaatccagatctataac

SEQ ID NO: 2006 - RNA, 21 nt, Homo sapiens
  source 1..21: mol_type = genomic RNA
gttatagatctggatttgaac

SEQ ID NO: 2007 - RNA, 19 nt, Homo sapiens
  source 1..19: mol_type = genomic RNA
ccggttccagtccctggag

SEQ ID NO: 2008 - RNA, 19 nt, Homo sapiens
  source 1..19: mol_type = genomic RNA
ctccagggactggaaccgg

SEQ ID NO: 2009 - RNA, 20 nt, Homo sapiens
  source 1..20: mol_type = genomic RNA
agggtgtttctctcatctct

SEQ ID NO: 2010 - RNA, 20 nt, Homo sapiens
  source 1..20: mol_type = genomic RNA
agagatgagagaaacaccct

SEQ ID NO: 2011 - RNA, 24 nt, Homo sapiens
  source 1..24: mol_type = genomic RNA
gacctggacatgtttgtgcccagt

SEQ ID NO: 2012 - RNA, 24 nt, Homo sapiens
  source 1..24: mol_type = genomic RNA
actgggcacaaacatgtccaggtc

SEQ ID NO: 2013 - RNA, 20 nt, Homo sapiens
  source 1..20: mol_type = genomic RNA
atggagatagatatagaaat

SEQ ID NO: 2014 - RNA, 20 nt, Homo sapiens
  source 1..20: mol_type = genomic RNA
atttctatatctatctccat

SEQ ID NO: 2015 - RNA, 19 nt, Homo sapiens
  source 1..19: mol_type = genomic RNA
agctgtctgaaaatgtctt

SEQ ID NO: 2016 - RNA, 19 nt, Homo sapiens
  source 1..19: mol_type = genomic RNA
aagacattttcagacagct

SEQ ID NO: 2017 - RNA, 21 nt, Homo sapiens
  source 1..21: mol_type = genomic RNA
agacctggcccagacctcagc

SEQ ID NO: 2018 - RNA, 21 nt, Homo sapiens
  source 1..21: mol_type = genomic RNA
gctgaggtctgggccaggtct

SEQ ID NO: 2019 - RNA, 23 nt, Homo sapiens
  source 1..23: mol_type = genomic RNA
acttgggcactgaaacaatgtcc

SEQ ID NO: 2020 - RNA, 23 nt, Homo sapiens
  source 1..23: mol_type = genomic RNA
ggacattgtttcagtgcccaagt

SEQ ID NO: 2021 - RNA, 24 nt, Homo sapiens
  source 1..24: mol_type = genomic RNA
actgggggctttcgggctctgcgt

SEQ ID NO: 2022 - RNA, 24 nt, Homo sapiens
  source 1..24: mol_type = genomic RNA
acgcagagcccgaaagcccccagt

SEQ ID NO: 2023 - RNA, 23 nt, Homo sapiens
  source 1..23: mol_type = genomic RNA
atcgctgcggttgcgagcgctgt

SEQ ID NO: 2024 - RNA, 23 nt, Homo sapiens
  source 1..23: mol_type = genomic RNA
acagcgctcgcaaccgcagcgat

SEQ ID NO: 2025 - RNA, 22 nt, Homo sapiens
  source 1..22: mol_type = genomic RNA
gtccctctccaaatgtgtcttg

SEQ ID NO: 2026 - RNA, 22 nt, Homo sapiens
  source 1..22: mol_type = genomic RNA
caagacacatttggagagggac

SEQ ID NO: 2027 - RNA, 22 nt, Homo sapiens
  source 1..22: mol_type = genomic RNA
acttgtatgctagctcaggtag

SEQ ID NO: 2028 - RNA, 22 nt, Homo sapiens
  source 1..22: mol_type = genomic RNA
ctacctgagctagcatacaagt

SEQ ID NO: 2029 - RNA, 22 nt, Homo sapiens
  source 1..22: mol_type = genomic RNA
tttaggataagcttgacttttg

SEQ ID NO: 2030 - RNA, 22 nt, Homo sapiens
  source 1..22: mol_type = genomic RNA
caaaagtcaagcttatcctaaa

SEQ ID NO: 2031 - RNA, 21 nt, Homo sapiens
  source 1..21: mol_type = genomic RNA
gtgttgaaacaatctctactg

SEQ ID NO: 2032 - RNA, 21 nt, Homo sapiens
  source 1..21: mol_type = genomic RNA
cagtagagattgtttcaacac

SEQ ID NO: 2033 - RNA, 22 nt, Homo sapiens
  source 1..22: mol_type = genomic RNA
tatgtctgctgaccatcacctt

SEQ ID NO: 2034 - RNA, 22 nt, Homo sapiens
  source 1..22: mol_type = genomic RNA
aaggtgatggtcagcagacata

SEQ ID NO: 2035 - RNA, 22 nt, Homo sapiens
  source 1..22: mol_type = genomic RNA
ggggctggggccggggccgagc

SEQ ID NO: 2036 - RNA, 22 nt, Homo sapiens
  source 1..22: mol_type = genomic RNA
gctcggccccggccccagcccc

SEQ ID NO: 2037 - RNA, 22 nt, Homo sapiens
  source 1..22: mol_type = genomic RNA
tgaggtagtaggttgtatggtt

SEQ ID NO: 2038 - RNA, 22 nt, Homo sapiens
  source 1..22: mol_type = genomic RNA
aaccatacaacctactacctca

SEQ ID NO: 2039 - RNA, 21 nt, Homo sapiens
  source 1..21: mol_type = genomic RNA
gtgtcttttgctctgcagtca

SEQ ID NO: 2040 - RNA, 21 nt, Homo sapiens
  source 1..21: mol_type = genomic RNA
tgactgcagagcaaaagacac

SEQ ID NO: 2041 - RNA, 24 nt, Homo sapiens
  source 1..24: mol_type = genomic RNA
ccccgggaacgtcgagactggagc

SEQ ID NO: 2042 - RNA, 24 nt, Homo sapiens
  source 1..24: mol_type = genomic RNA
gctccagtctcgacgttcccgggg

SEQ ID NO: 2043 - RNA, 22 nt, Homo sapiens
  source 1..22: mol_type = genomic RNA
acccgtcccgttcgtccccgga

SEQ ID NO: 2044 - RNA, 22 nt, Homo sapiens
  source 1..22: mol_type = genomic RNA
tccggggacgaacgggacgggt

SEQ ID NO: 2045 - RNA, 22 nt, Homo sapiens
  source 1..22: mol_type = genomic RNA
atgggtgaatttgtagaaggat

SEQ ID NO: 2046 - RNA, 22 nt, Homo sapiens
  source 1..22: mol_type = genomic RNA
atccttctacaaattcacccat

SEQ ID NO: 2047 - RNA, 22 nt, Homo sapiens
  source 1..22: mol_type = genomic RNA
ctggactgagccgtgctactgg

SEQ ID NO: 2048 - RNA, 22 nt, Homo sapiens
  source 1..22: mol_type = genomic RNA
ccagtagcacggctcagtccag

SEQ ID NO: 2049 - RNA, 22 nt, Homo sapiens
  source 1..22: mol_type = genomic RNA
ctggactgagccatgctactgg

SEQ ID NO: 2050 - RNA, 22 nt, Homo sapiens
  source 1..22: mol_type = genomic RNA
ccagtagcatggctcagtccag

SEQ ID NO: 2051 - RNA, 22 nt, Homo sapiens
  source 1..22: mol_type = genomic RNA
tacgtagatatatatgtatttt

SEQ ID NO: 2052 - RNA, 22 nt, Homo sapiens
  source 1..22: mol_type = genomic RNA
aaaatacatatatatctacgta

SEQ ID NO: 2053 - RNA, 24 nt, Homo sapiens
  source 1..24: mol_type = genomic RNA
aaatatatatatatatgtacgtat

SEQ ID NO: 2054 - RNA, 22 nt, Homo sapiens
  source 1..22: mol_type = genomic RNA
gctcttttcattaatgtagaca

SEQ ID NO: 2055 - RNA, 22 nt, Homo sapiens
  source 1..22: mol_type = genomic RNA
tgctggatcagtggttcgagtc

SEQ ID NO: 2056 - RNA, 22 nt, Homo sapiens
  source 1..22: mol_type = genomic RNA
gactcgaaccactgatccagca

SEQ ID NO: 2057 - RNA, 19 nt, Homo sapiens
  source 1..19: mol_type = genomic RNA
tggatttttggatcaggga

SEQ ID NO: 2058 - RNA, 19 nt, Homo sapiens
  source 1..19: mol_type = genomic RNA
tccctgatccaaaaatcca

SEQ ID NO: 2059 - RNA, 22 nt, Homo sapiens
  source 1..22: mol_type = genomic RNA
ttataaagcaatgagactgatt

SEQ ID NO: 2060 - RNA, 22 nt, Homo sapiens
  source 1..22: mol_type = genomic RNA
aatcagtctcattgctttataa

SEQ ID NO: 2061 - RNA, 23 nt, Homo sapiens
  source 1..23: mol_type = genomic RNA
tagtgcaatattgcttatagggt

SEQ ID NO: 2062 - RNA, 23 nt, Homo sapiens
  source 1..23: mol_type = genomic RNA
accctataagcaatattgcacta

SEQ ID NO: 2063 - RNA, 22 nt, Homo sapiens
  source 1..22: mol_type = genomic RNA
accctatcaatattgtctctgc

SEQ ID NO: 2064 - RNA, 22 nt, Homo sapiens
  source 1..22: mol_type = genomic RNA
gcagagacaatattgatagggt

SEQ ID NO: 2065 - RNA, 17 nt, Homo sapiens
  source 1..17: mol_type = genomic RNA
taagtgcttccatgctt

SEQ ID NO: 2066 - RNA, 17 nt, Homo sapiens
  source 1..17: mol_type = genomic RNA
aagcatggaagcactta

SEQ ID NO: 2067 - RNA, 22 nt, Homo sapiens
  source 1..22: mol_type = genomic RNA
tcggcctgaccacccaccccac

SEQ ID NO: 2068 - RNA, 22 nt, Homo sapiens
  source 1..22: mol_type = genomic RNA
gtggggtgggtggtcaggccga

SEQ ID NO: 2069 - RNA, 21 nt, Homo sapiens
  source 1..21: mol_type = genomic RNA
ggggggggggggggggggccg

SEQ ID NO: 2070 - RNA, 21 nt, Homo sapiens
  source 1..21: mol_type = genomic RNA
cggcccccccccccccccccc

SEQ ID NO: 2071 - RNA, 22 nt, Homo sapiens
  source 1..22: mol_type = genomic RNA
ctatacgacctgctgcctttct

SEQ ID NO: 2072 - RNA, 22 nt, Homo sapiens
  source 1..22: mol_type = genomic RNA
agaaaggcagcaggtcgtatag

SEQ ID NO: 2073 - RNA, 22 nt, Homo sapiens
  source 1..22: mol_type = genomic RNA
agaggtagtaggttgcatagtt

SEQ ID NO: 2074 - RNA, 22 nt, Homo sapiens
  source 1..22: mol_type = genomic RNA
aactatgcaacctactacctct

SEQ ID NO: 2075 - RNA, 22 nt, Homo sapiens
  source 1..22: mol_type = genomic RNA
ccgcactgtgggtacttgctgc

SEQ ID NO: 2076 - RNA, 22 nt, Homo sapiens
  source 1..22: mol_type = genomic RNA
gcagcaagtacccacagtgcgg

SEQ ID NO: 2077 - RNA, 21 nt, Homo sapiens
  source 1..21: mol_type = genomic RNA
taaagtgctgacagtgcagat

SEQ ID NO: 2078 - RNA, 21 nt, Homo sapiens
  source 1..21: mol_type = genomic RNA
atctgcactgtcagcacttta

SEQ ID NO: 2079 - RNA, 22 nt, Homo sapiens
  source 1..22: mol_type = genomic RNA
aactggatcaattataggagtg

SEQ ID NO: 2080 - RNA, 22 nt, Homo sapiens
  source 1..22: mol_type = genomic RNA
cactcctataattgatccagtt

SEQ ID NO: 2081 - RNA, 26 nt, Homo sapiens
  source 1..26: mol_type = genomic RNA
aagtagttggtttgtatgagatggtt

SEQ ID NO: 2082 - RNA, 26 nt, Homo sapiens
  source 1..26: mol_type = genomic RNA
aaccatctcatacaaaccaactactt

SEQ ID NO: 2083 - RNA, 21 nt, Homo sapiens
  source 1..21: mol_type = genomic RNA
aagtgatctaaaggcctacat

SEQ ID NO: 2084 - RNA, 21 nt, Homo sapiens
  source 1..21: mol_type = genomic RNA
atgtaggcctttagatcactt

SEQ ID NO: 2085 - RNA, 22 nt, Homo sapiens
  source 1..22: mol_type = genomic RNA
tcagatgatctaaaggcctata

SEQ ID NO: 2086 - RNA, 22 nt, Homo sapiens
  source 1..22: mol_type = genomic RNA
tataggcctttagatcatctga

SEQ ID NO: 2087 - RNA, 21 nt, Homo sapiens
  source 1..21: mol_type = genomic RNA
taggcctttagatcacttaaa

SEQ ID NO: 2088 - RNA, 21 nt, Homo sapiens
  source 1..21: mol_type = genomic RNA
tttaagtgatctaaaggccta

SEQ ID NO: 2089 - RNA, 21 nt, Homo sapiens
  source 1..21: mol_type = genomic RNA
actctagctgccaaaggcgct

SEQ ID NO: 2090 - RNA, 21 nt, Homo sapiens
  source 1..21: mol_type = genomic RNA
agcgcctttggcagctagagt

SEQ ID NO: 2091 - RNA, 22 nt, Homo sapiens
  source 1..22: mol_type = genomic RNA
agaaggaaattgaattcattta

SEQ ID NO: 2092 - RNA, 22 nt, Homo sapiens
  source 1..22: mol_type = genomic RNA
taaatgaattcaatttccttct

SEQ ID NO: 2093 - RNA, 21 nt, Homo sapiens
  source 1..21: mol_type = genomic RNA
agagaagaagatcagcctgca

SEQ ID NO: 2094 - RNA, 21 nt, Homo sapiens
  source 1..21: mol_type = genomic RNA
tgcaggctgatcttcttctct

SEQ ID NO: 2095 - RNA, 24 nt, Homo sapiens
  source 1..24: mol_type = genomic RNA
agcctggaagctggagcctgcagt

SEQ ID NO: 2096 - RNA, 24 nt, Homo sapiens
  source 1..24: mol_type = genomic RNA
actgcaggctccagcttccaggct

SEQ ID NO: 2097 - RNA, 23 nt, Homo sapiens
  source 1..23: mol_type = genomic RNA
aggatgagcaaagaaagtagatt

SEQ ID NO: 2098 - RNA, 23 nt, Homo sapiens
  source 1..23: mol_type = genomic RNA
aatctactttctttgctcatcct

SEQ ID NO: 2099 - RNA, 22 nt, Homo sapiens
  source 1..22: mol_type = genomic RNA
aaccactttctttgctcatcca

SEQ ID NO: 2100 - RNA, 22 nt, Homo sapiens
  source 1..22: mol_type = genomic RNA
tggatgagcaaagaaagtggtt

SEQ ID NO: 2101 - RNA, 22 nt, Homo sapiens
  source 1..22: mol_type = genomic RNA
cggatgagcaaagaaagtggtt

SEQ ID NO: 2102 - RNA, 22 nt, Homo sapiens
  source 1..22: mol_type = genomic RNA
aaccactttctttgctcatccg

SEQ ID NO: 2103 - RNA, 22 nt, Homo sapiens
  source 1..22: mol_type = genomic RNA
aggcattgacttctcactagct

SEQ ID NO: 2104 - RNA, 22 nt, Homo sapiens
  source 1..22: mol_type = genomic RNA
agctagtgagaagtcaatgcct

SEQ ID NO: 2105 - RNA, 21 nt, Homo sapiens
  source 1..21: mol_type = genomic RNA
agtgaatgatgggttctgacc

SEQ ID NO: 2106 - RNA, 21 nt, Homo sapiens
  source 1..21: mol_type = genomic RNA
ggtcagaacccatcattcact

SEQ ID NO: 2107 - RNA, 21 nt, Homo sapiens
  source 1..21: mol_type = genomic RNA
agttaggattaggtcgtggaa

SEQ ID NO: 2108 - RNA, 21 nt, Homo sapiens
  source 1..21: mol_type = genomic RNA
ttccacgacctaatcctaact

SEQ ID NO: 2109 - RNA, 19 nt, Homo sapiens
  source 1..19: mol_type = genomic RNA
atggataaggctttggctt

SEQ ID NO: 2110 - RNA, 19 nt, Homo sapiens
  source 1..19: mol_type = genomic RNA
aagccaaagccttatccat

SEQ ID NO: 2111 - RNA, 22 nt, Homo sapiens
  source 1..22: mol_type = genomic RNA
atggtaccctggcatactgagt

SEQ ID NO: 2112 - RNA, 22 nt, Homo sapiens
  source 1..22: mol_type = genomic RNA
actcagtatgccagggtaccat

SEQ ID NO: 2113 - RNA, 23 nt, Homo sapiens
  source 1..23: mol_type = genomic RNA
caagtcttatttgagcacctgtt

SEQ ID NO: 2114 - RNA, 23 nt, Homo sapiens
  source 1..23: mol_type = genomic RNA
aacaggtgctcaaataagacttg

SEQ ID NO: 2115 - RNA, 22 nt, Homo sapiens
  source 1..22: mol_type = genomic RNA
caggatgtggtcaagtgttgtt

SEQ ID NO: 2116 - RNA, 22 nt, Homo sapiens
  source 1..22: mol_type = genomic RNA
aacaacacttgaccacatcctg

SEQ ID NO: 2117 - RNA, 23 nt, Homo sapiens
  source 1..23: mol_type = genomic RNA
cctcagggctgtagaacagggct

SEQ ID NO: 2118 - RNA, 23 nt, Homo sapiens
  source 1..23: mol_type = genomic RNA
agccctgttctacagccctgagg

SEQ ID NO: 2119 - RNA, 21 nt, Homo sapiens
  source 1..21: mol_type = genomic RNA
cctgttgaagtgtaatcccca

SEQ ID NO: 2120 - RNA, 21 nt, Homo sapiens
  source 1..21: mol_type = genomic RNA
tggggattacacttcaacagg

SEQ ID NO: 2121 - RNA, 18 nt, Homo sapiens
  source 1..18: mol_type = genomic RNA
cgggcgtggtggtggggg

SEQ ID NO: 2122 - RNA, 18 nt, Homo sapiens
  source 1..18: mol_type = genomic RNA
cccccaccaccacgcccg

SEQ ID NO: 2123 - RNA, 20 nt, Homo sapiens
  source 1..20: mol_type = genomic RNA
cgggcgtggtggtgggggtg

SEQ ID NO: 2124 - RNA, 20 nt, Homo sapiens
  source 1..20: mol_type = genomic RNA
cacccccaccaccacgcccg

SEQ ID NO: 2125 - RNA, 23 nt, Homo sapiens
  source 1..23: mol_type = genomic RNA
ctggagatatggaagagctgtgt

SEQ ID NO: 2126 - RNA, 23 nt, Homo sapiens
  source 1..23: mol_type = genomic RNA
acacagctcttccatatctccag

SEQ ID NO: 2127 - RNA, 26 nt, Homo sapiens
  source 1..26: mol_type = genomic RNA
gatgatgatggcagcaaattctgaaa

SEQ ID NO: 2128 - RNA, 26 nt, Homo sapiens
  source 1..26: mol_type = genomic RNA
tttcagaatttgctgccatcatcatc

SEQ ID NO: 2129 - RNA, 25 nt, Homo sapiens
  source 1..25: mol_type = genomic RNA
gggcgacaaagcaagactctttctt

SEQ ID NO: 2130 - RNA, 25 nt, Homo sapiens
  source 1..25: mol_type = genomic RNA
aagaaagagtcttgctttgtcgccc

SEQ ID NO: 2131 - RNA, 25 nt, Homo sapiens
  source 1..25: mol_type = genomic RNA
gaacccatgaggttgaggctgcagt

SEQ ID NO: 2132 - RNA, 25 nt, Homo sapiens
  source 1..25: mol_type = genomic RNA
actgcagcctcaacctcatgggttc

SEQ ID NO: 2133 - RNA, 17 nt, Homo sapiens
  source 1..17: mol_type = genomic RNA
gtgggggagaggctgtc

SEQ ID NO: 2134 - RNA, 17 nt, Homo sapiens
  source 1..17: mol_type = genomic RNA
gacagcctctcccccac

SEQ ID NO: 2135 - RNA, 20 nt, Homo sapiens
  source 1..20: mol_type = genomic RNA
taaagagccctgtggagaca

SEQ ID NO: 2136 - RNA, 20 nt, Homo sapiens
  source 1..20: mol_type = genomic RNA
tgtctccacagggctcttta

SEQ ID NO: 2137 - RNA, 22 nt, Homo sapiens
  source 1..22: mol_type = genomic RNA
tagtactgtgcatatcatctat

SEQ ID NO: 2138 - RNA, 22 nt, Homo sapiens
  source 1..22: mol_type = genomic RNA
atagatgatatgcacagtacta

SEQ ID NO: 2139 - RNA, 20 nt, Homo sapiens
  source 1..20: mol_type = genomic RNA
tcgtttgcctttttctgctt

SEQ ID NO: 2140 - RNA, 20 nt, Homo sapiens
  source 1..20: mol_type = genomic RNA
aagcagaaaaaggcaaacga

SEQ ID NO: 2141 - RNA, 21 nt, Homo sapiens
  source 1..21: mol_type = genomic RNA
tggactgccctgatctggaga

SEQ ID NO: 2142 - RNA, 21 nt, Homo sapiens
  source 1..21: mol_type = genomic RNA
tctccagatcagggcagtcca

SEQ ID NO: 2143 - RNA, 22 nt, Homo sapiens
  source 1..22: mol_type = genomic RNA
tgggtggtctggagatttgtgc

SEQ ID NO: 2144 - RNA, 22 nt, Homo sapiens
  source 1..22: mol_type = genomic RNA
gcacaaatctccagaccaccca

SEQ ID NO: 2145 - RNA, 22 nt, Homo sapiens
  source 1..22: mol_type = genomic RNA
tgtgaggttggcattgttgtct

SEQ ID NO: 2146 - RNA, 22 nt, Homo sapiens
  source 1..22: mol_type = genomic RNA
agacaacaatgccaacctcaca

SEQ ID NO: 2147 - RNA, 17 nt, Homo sapiens
  source 1..17: mol_type = genomic RNA
ttcaagtaattcaggtg

SEQ ID NO: 2148 - RNA, 17 nt, Homo sapiens
  source 1..17: mol_type = genomic RNA
cacctgaattacttgaa

SEQ ID NO: 2149 - RNA, 22 nt, Homo sapiens
  source 1..22: mol_type = genomic RNA
ttctggaattctgtgtgaggga

SEQ ID NO: 2150 - RNA, 22 nt, Homo sapiens
  source 1..22: mol_type = genomic RNA
tccctcacacagaattccagaa

SEQ ID NO: 2151 - RNA, 22 nt, Homo sapiens
  source 1..22: mol_type = genomic RNA
ttttcaactctaatgggagaga

SEQ ID NO: 2152 - RNA, 22 nt, Homo sapiens
  source 1..22: mol_type = genomic RNA
tctctcccattagagttgaaaa

SEQ ID NO: 2153 - RNA, 18 nt, Homo sapiens
  source 1..18: mol_type = genomic RNA
acgttggctctggtggtg

SEQ ID NO: 2154 - RNA, 18 nt, Homo sapiens
  source 1..18: mol_type = genomic RNA
caccaccagagccaacgt

SEQ ID NO: 2155 - RNA, 22 nt, Homo sapiens
  source 1..22: mol_type = genomic RNA
ccacctcccctgcaaacgtcca

SEQ ID NO: 2156 - RNA, 22 nt, Homo sapiens
  source 1..22: mol_type = genomic RNA
tggacgtttgcaggggaggtgg

SEQ ID NO: 2157 - RNA, 22 nt, Homo sapiens
  source 1..22: mol_type = genomic RNA
actcggcgtggcgtcggtcgtg

SEQ ID NO: 2158 - RNA, 22 nt, Homo sapiens
  source 1..22: mol_type = genomic RNA
cacgaccgacgccacgccgagt

SEQ ID NO: 2159 - RNA, 21 nt, Homo sapiens
  source 1..21: mol_type = genomic RNA
tcgaccggacctcgaccggct

SEQ ID NO: 2160 - RNA, 21 nt, Homo sapiens
  source 1..21: mol_type = genomic RNA
agccggtcgaggtccggtcga

SEQ ID NO: 2161 - RNA, 22 nt, Homo sapiens
  source 1..22: mol_type = genomic RNA
tgagaactgaattccataggct

SEQ ID NO: 2162 - RNA, 22 nt, Homo sapiens
  source 1..22: mol_type = genomic RNA
agcctatggaattcagttctca

SEQ ID NO: 2163 - RNA, 22 nt, Homo sapiens
  source 1..22: mol_type = genomic RNA
aatcatacacggttgacctatt

SEQ ID NO: 2164 - RNA, 22 nt, Homo sapiens
  source 1..22: mol_type = genomic RNA
aataggtcaaccgtgtatgatt

SEQ ID NO: 2165 - RNA, 22 nt, Homo sapiens
  source 1..22: mol_type = genomic RNA
taggttatccgtgttgccttcg

SEQ ID NO: 2166 - RNA, 22 nt, Homo sapiens
  source 1..22: mol_type = genomic RNA
cgaaggcaacacggataaccta

SEQ ID NO: 2167 - RNA, 21 nt, Homo sapiens
  source 1..21: mol_type = genomic RNA
ccagtcctgtgcctgccgcct

SEQ ID NO: 2168 - RNA, 21 nt, Homo sapiens
  source 1..21: mol_type = genomic RNA
aggcggcaggcacaggactgg

SEQ ID NO: 2169 - RNA, 22 nt, Homo sapiens
  source 1..22: mol_type = genomic RNA
tctgccccctccgctgctgcca

SEQ ID NO: 2170 - RNA, 22 nt, Homo sapiens
  source 1..22: mol_type = genomic RNA
tggcagcagcggagggggcaga

SEQ ID NO: 2171 - RNA, 22 nt, Homo sapiens
  source 1..22: mol_type = genomic RNA
ggaggggtcccgcactgggagg

SEQ ID NO: 2172 - RNA, 22 nt, Homo sapiens
  source 1..22: mol_type = genomic RNA
cctcccagtgcgggacccctcc

SEQ ID NO: 2173 - RNA, 22 nt, Homo sapiens
  source 1..22: mol_type = genomic RNA
ccctgtgcccggcccacttctg

SEQ ID NO: 2174 - RNA, 22 nt, Homo sapiens
  source 1..22: mol_type = genomic RNA
cagaagtgggccgggcacaggg

SEQ ID NO: 2175 - RNA, 20 nt, Homo sapiens
  source 1..20: mol_type = genomic RNA
ccccagggcgacgcggcggg

SEQ ID NO: 2176 - RNA, 20 nt, Homo sapiens
  source 1..20: mol_type = genomic RNA
cccgccgcgtcgccctgggg

SEQ ID NO: 2177 - RNA, 22 nt, Homo sapiens
  source 1..22: mol_type = genomic RNA
accttgccttgctgcccgggcc

SEQ ID NO: 2178 - RNA, 22 nt, Homo sapiens
  source 1..22: mol_type = genomic RNA
ggcccgggcagcaaggcaaggt

SEQ ID NO: 2179 - RNA, 21 nt, Homo sapiens
  source 1..21: mol_type = genomic RNA
atttgtgcttggctctgtcac

SEQ ID NO: 2180 - RNA, 21 nt, Homo sapiens
  source 1..21: mol_type = genomic RNA
gtgacagagccaagcacaaat

SEQ ID NO: 2181 - RNA, 22 nt, Homo sapiens
  source 1..22: mol_type = genomic RNA
attgtccttgctgtttggagat

SEQ ID NO: 2182 - RNA, 22 nt, Homo sapiens
  source 1..22: mol_type = genomic RNA
atctccaaacagcaaggacaat

SEQ ID NO: 2183 - RNA, 21 nt, Homo sapiens
  source 1..21: mol_type = genomic RNA
atccccagatacaatggacaa

SEQ ID NO: 2184 - RNA, 21 nt, Homo sapiens
  source 1..21: mol_type = genomic RNA
ttgtccattgtatctggggat

SEQ ID NO: 2185 - RNA, 23 nt, Homo sapiens
  source 1..23: mol_type = genomic RNA
cagtgcaatagtattgtcaaagc

SEQ ID NO: 2186 - RNA, 23 nt, Homo sapiens
  source 1..23: mol_type = genomic RNA
gctttgacaatactattgcactg

SEQ ID NO: 2187 - RNA, 22 nt, Homo sapiens
  source 1..22: mol_type = genomic RNA
gctctgactttattgcactact

SEQ ID NO: 2188 - RNA, 22 nt, Homo sapiens
  source 1..22: mol_type = genomic RNA
agtagtgcaataaagtcagagc

SEQ ID NO: 2189 - RNA, 23 nt, Homo sapiens
  source 1..23: mol_type = genomic RNA
taagtgcttccatgttttagtag

SEQ ID NO: 2190 - RNA, 23 nt, Homo sapiens
  source 1..23: mol_type = genomic RNA
ctactaaaacatggaagcactta

SEQ ID NO: 2191 - RNA, 22 nt, Homo sapiens
  source 1..22: mol_type = genomic RNA
actttaacatggaagtgctttc

SEQ ID NO: 2192 - RNA, 22 nt, Homo sapiens
  source 1..22: mol_type = genomic RNA
gaaagcacttccatgttaaagt

SEQ ID NO: 2193 - RNA, 23 nt, Homo sapiens
  source 1..23: mol_type = genomic RNA
taagtgcttccatgtttcagtgg

SEQ ID NO: 2194 - RNA, 23 nt, Homo sapiens
  source 1..23: mol_type = genomic RNA
ccactgaaacatggaagcactta

SEQ ID NO: 2195 - RNA, 22 nt, Homo sapiens
  source 1..22: mol_type = genomic RNA
tttaacatgggggtacctgctg

SEQ ID NO: 2196 - RNA, 22 nt, Homo sapiens
  source 1..22: mol_type = genomic RNA
cagcaggtacccccatgttaaa

SEQ ID NO: 2197 - RNA, 23 nt, Homo sapiens
  source 1..23: mol_type = genomic RNA
taagtgcttccatgtttgagtgt

SEQ ID NO: 2198 - RNA, 23 nt, Homo sapiens
  source 1..23: mol_type = genomic RNA
acactcaaacatggaagcactta

SEQ ID NO: 2199 - RNA, 22 nt, Homo sapiens
  source 1..22: mol_type = genomic RNA
actttaacatggaggcacttgc

SEQ ID NO: 2200 - RNA, 22 nt, Homo sapiens
  source 1..22: mol_type = genomic RNA
gcaagtgcctccatgttaaagt

SEQ ID NO: 2201 - RNA, 22 nt, Homo sapiens
  source 1..22: mol_type = genomic RNA
aattgcactttagcaatggtga

SEQ ID NO: 2202 - RNA, 22 nt, Homo sapiens
  source 1..22: mol_type = genomic RNA
tcaccattgctaaagtgcaatt

SEQ ID NO: 2203 - RNA, 22 nt, Homo sapiens
  source 1..22: mol_type = genomic RNA
actgttgctaatatgcaactct

SEQ ID NO: 2204 - RNA, 22 nt, Homo sapiens
  source 1..22: mol_type = genomic RNA
agagttgcatattagcaacagt

SEQ ID NO: 2205 - RNA, 23 nt, Homo sapiens
  source 1..23: mol_type = genomic RNA
agctcggtctgaggcccctcagt

SEQ ID NO: 2206 - RNA, 23 nt, Homo sapiens
  source 1..23: mol_type = genomic RNA
actgaggggcctcagaccgagct

SEQ ID NO: 2207 - RNA, 22 nt, Homo sapiens
  source 1..22: mol_type = genomic RNA
aaaaactgagactacttttgca

SEQ ID NO: 2208 - RNA, 22 nt, Homo sapiens
  source 1..22: mol_type = genomic RNA
tgcaaaagtagtctcagttttt

SEQ ID NO: 2209 - RNA, 19 nt, Homo sapiens
  source 1..19: mol_type = genomic RNA
aaaaactgtaattactttt

SEQ ID NO: 2210 - RNA, 19 nt, Homo sapiens
  source 1..19: mol_type = genomic RNA
aaaagtaattacagttttt

SEQ ID NO: 2211 - RNA, 22 nt, Homo sapiens
  source 1..22: mol_type = genomic RNA
aaaactgtaattacttttgtac

SEQ ID NO: 2212 - RNA, 22 nt, Homo sapiens
  source 1..22: mol_type = genomic RNA
gtacaaaagtaattacagtttt

SEQ ID NO: 2213 - RNA, 23 nt, Homo sapiens
  source 1..23: mol_type = genomic RNA
tgcaaaagtaattgcagtttttg

SEQ ID NO: 2214 - RNA, 23 nt, Homo sapiens
  source 1..23: mol_type = genomic RNA
caaaaactgcaattacttttgca

SEQ ID NO: 2215 - RNA, 23 nt, Homo sapiens
  source 1..23: mol_type = genomic RNA
caaaaaccgcaattacttttgca

SEQ ID NO: 2216 - RNA, 23 nt, Homo sapiens
  source 1..23: mol_type = genomic RNA
tgcaaaagtaattgcggtttttg

SEQ ID NO: 2217 - RNA, 22 nt, Homo sapiens
  source 1..22: mol_type = genomic RNA
aaaagtaatcgcggtttttgtc

SEQ ID NO: 2218 - RNA, 22 nt, Homo sapiens
  source 1..22: mol_type = genomic RNA
gacaaaaaccgcgattactttt

SEQ ID NO: 2219 - RNA, 22 nt, Homo sapiens
  source 1..22: mol_type = genomic RNA
aaaagtacttgcggattttgct

SEQ ID NO: 2220 - RNA, 22 nt, Homo sapiens
  source 1..22: mol_type = genomic RNA
agcaaaatccgcaagtactttt

SEQ ID NO: 2221 - RNA, 22 nt, Homo sapiens
  source 1..22: mol_type = genomic RNA
aaaagtatttgcgggttttgtc

SEQ ID NO: 2222 - RNA, 22 nt, Homo sapiens
  source 1..22: mol_type = genomic RNA
gacaaaacccgcaaatactttt

SEQ ID NO: 2223 - RNA, 21 nt, Homo sapiens
  source 1..21: mol_type = genomic RNA
caaaggtatttgtggtttttg

SEQ ID NO: 2224 - RNA, 21 nt, Homo sapiens
  source 1..21: mol_type = genomic RNA
caaaaaccacaaatacctttg

SEQ ID NO: 2225 - RNA, 22 nt, Homo sapiens
  source 1..22: mol_type = genomic RNA
ccaaaactgcagttacttttgc

SEQ ID NO: 2226 - RNA, 22 nt, Homo sapiens
  source 1..22: mol_type = genomic RNA
gcaaaagtaactgcagttttgg

SEQ ID NO: 2227 - RNA, 22 nt, Homo sapiens
  source 1..22: mol_type = genomic RNA
aaaagtaattgcggtttttgcc

SEQ ID NO: 2228 - RNA, 22 nt, Homo sapiens
  source 1..22: mol_type = genomic RNA
ggcaaaaaccgcaattactttt

SEQ ID NO: 2229 - RNA, 22 nt, Homo sapiens
  source 1..22: mol_type = genomic RNA
tagcaaaaactgcagttacttt

SEQ ID NO: 2230 - RNA, 22 nt, Homo sapiens
  source 1..22: mol_type = genomic RNA
aaagtaactgcagtttttgcta

SEQ ID NO: 2231 - RNA, 20 nt, Homo sapiens
  source 1..20: mol_type = genomic RNA
ggaggttgggaagggcagag

SEQ ID NO: 2232 - RNA, 20 nt, Homo sapiens
  source 1..20: mol_type = genomic RNA
ctctgcccttcccaacctcc

SEQ ID NO: 2233 - RNA, 18 nt, Homo sapiens
  source 1..18: mol_type = genomic RNA
tgaggcgggggggcgagc

SEQ ID NO: 2234 - RNA, 18 nt, Homo sapiens
  source 1..18: mol_type = genomic RNA
gctcgcccccccgcctca

SEQ ID NO: 2235 - RNA, 20 nt, Homo sapiens
  source 1..20: mol_type = genomic RNA
agagatgaagcgggggggcg

SEQ ID NO: 2236 - RNA, 20 nt, Homo sapiens
  source 1..20: mol_type = genomic RNA
cgcccccccgcttcatctct

SEQ ID NO: 2237 - RNA, 24 nt, Homo sapiens
  source 1..24: mol_type = genomic RNA
ggaggccggggtggggcggggcgg

SEQ ID NO: 2238 - RNA, 24 nt, Homo sapiens
  source 1..24: mol_type = genomic RNA
ccgccccgccccaccccggcctcc

SEQ ID NO: 2239 - RNA, 19 nt, Homo sapiens
  source 1..19: mol_type = genomic RNA
ggggagcgaggggcggggc

SEQ ID NO: 2240 - RNA, 19 nt, Homo sapiens
  source 1..19: mol_type = genomic RNA
gccccgcccctcgctcccc

SEQ ID NO: 2241 - RNA, 23 nt, Homo sapiens
  source 1..23: mol_type = genomic RNA
tattcatttatccccagcctaca

SEQ ID NO: 2242 - RNA, 23 nt, Homo sapiens
  source 1..23: mol_type = genomic RNA
tgtaggctggggataaatgaata

SEQ ID NO: 2243 - RNA, 24 nt, Homo sapiens
  source 1..24: mol_type = genomic RNA
actggctagggaaaatgattggat

SEQ ID NO: 2244 - RNA, 24 nt, Homo sapiens
  source 1..24: mol_type = genomic RNA
atccaatcattttccctagccagt

SEQ ID NO: 2245 - RNA, 22 nt, Homo sapiens
  source 1..22: mol_type = genomic RNA
ttcatttgcctcccagcctaca

SEQ ID NO: 2246 - RNA, 22 nt, Homo sapiens
  source 1..22: mol_type = genomic RNA
tgtaggctgggaggcaaatgaa

SEQ ID NO: 2247 - RNA, 24 nt, Homo sapiens
  source 1..24: mol_type = genomic RNA
tgggctaagggagatgattgggta

SEQ ID NO: 2248 - RNA, 24 nt, Homo sapiens
  source 1..24: mol_type = genomic RNA
tacccaatcatctcccttagccca

SEQ ID NO: 2249 - RNA, 22 nt, Homo sapiens
  source 1..22: mol_type = genomic RNA
actccagccccacagcctcagc

SEQ ID NO: 2250 - RNA, 22 nt, Homo sapiens
  source 1..22: mol_type = genomic RNA
gctgaggctgtggggctggagt

SEQ ID NO: 2251 - RNA, 22 nt, Homo sapiens
  source 1..22: mol_type = genomic RNA
aggaggaattggtgctggtctt

SEQ ID NO: 2252 - RNA, 22 nt, Homo sapiens
  source 1..22: mol_type = genomic RNA
aagaccagcaccaattcctcct

SEQ ID NO: 2253 - RNA, 22 nt, Homo sapiens
  source 1..22: mol_type = genomic RNA
aggcagcggggtgtagtggata

SEQ ID NO: 2254 - RNA, 22 nt, Homo sapiens
  source 1..22: mol_type = genomic RNA
tatccactacaccccgctgcct

SEQ ID NO: 2255 - RNA, 22 nt, Homo sapiens
  source 1..22: mol_type = genomic RNA
tccattacactaccctgcctct

SEQ ID NO: 2256 - RNA, 22 nt, Homo sapiens
  source 1..22: mol_type = genomic RNA
agaggcagggtagtgtaatgga

SEQ ID NO: 2257 - RNA, 22 nt, Homo sapiens
  source 1..22: mol_type = genomic RNA
actgctgagctagcacttcccg

SEQ ID NO: 2258 - RNA, 22 nt, Homo sapiens
  source 1..22: mol_type = genomic RNA
cgggaagtgctagctcagcagt

SEQ ID NO: 2259 - RNA, 23 nt, Homo sapiens
  source 1..23: mol_type = genomic RNA
caaagtgctgttcgtgcaggtag

SEQ ID NO: 2260 - RNA, 23 nt, Homo sapiens
  source 1..23: mol_type = genomic RNA
ctacctgcacgaacagcactttg

SEQ ID NO: 2261 - RNA, 23 nt, Homo sapiens
  source 1..23: mol_type = genomic RNA
cacccggctgtgtgcacatgtgc

SEQ ID NO: 2262 - RNA, 23 nt, Homo sapiens
  source 1..23: mol_type = genomic RNA
gcacatgtgcacacagccgggtg

SEQ ID NO: 2263 - RNA, 23 nt, Homo sapiens
  source 1..23: mol_type = genomic RNA
agcttctttacagtgctgccttg

SEQ ID NO: 2264 - RNA, 23 nt, Homo sapiens
  source 1..23: mol_type = genomic RNA
caaggcagcactgtaaagaagct

SEQ ID NO: 2265 - RNA, 23 nt, Homo sapiens
  source 1..23: mol_type = genomic RNA
agcagcattgtacagggctatga

SEQ ID NO: 2266 - RNA, 23 nt, Homo sapiens
  source 1..23: mol_type = genomic RNA
tcatagccctgtacaatgctgct

SEQ ID NO: 2267 - RNA, 17 nt, Homo sapiens
  source 1..17: mol_type = genomic RNA
cctgagaaaagggccaa

SEQ ID NO: 2268 - RNA, 17 nt, Homo sapiens
  source 1..17: mol_type = genomic RNA
ttggcccttttctcagg

SEQ ID NO: 2269 - RNA, 19 nt, Homo sapiens
  source 1..19: mol_type = genomic RNA
ggccactgagtcagcacca

SEQ ID NO: 2270 - RNA, 19 nt, Homo sapiens
  source 1..19: mol_type = genomic RNA
tggtgctgactcagtggcc

SEQ ID NO: 2271 - RNA, 18 nt, Homo sapiens
  source 1..18: mol_type = genomic RNA
agggcatgtccagggggt

SEQ ID NO: 2272 - RNA, 18 nt, Homo sapiens
  source 1..18: mol_type = genomic RNA
accccctggacatgccct

SEQ ID NO: 2273 - RNA, 23 nt, Homo sapiens
  source 1..23: mol_type = genomic RNA
gcctggagctactccaccatctc

SEQ ID NO: 2274 - RNA, 23 nt, Homo sapiens
  source 1..23: mol_type = genomic RNA
gagatggtggagtagctccaggc

SEQ ID NO: 2275 - RNA, 17 nt, Homo sapiens
  source 1..17: mol_type = genomic RNA
cagtgttcagagatgga

SEQ ID NO: 2276 - RNA, 17 nt, Homo sapiens
  source 1..17: mol_type = genomic RNA
tccatctctgaacactg

SEQ ID NO: 2277 - RNA, 18 nt, Homo sapiens
  source 1..18: mol_type = genomic RNA
atctgacctgatgaaggt

SEQ ID NO: 2278 - RNA, 18 nt, Homo sapiens
  source 1..18: mol_type = genomic RNA
accttcatcaggtcagat

SEQ ID NO: 2279 - RNA, 18 nt, Homo sapiens
  source 1..18: mol_type = genomic RNA
ccagaggtggggactgag

SEQ ID NO: 2280 - RNA, 18 nt, Homo sapiens
  source 1..18: mol_type = genomic RNA
ctcagtccccacctctgg

SEQ ID NO: 2281 - RNA, 17 nt, Homo sapiens
  source 1..17: mol_type = genomic RNA
ccccgccaccgccttgg

SEQ ID NO: 2282 - RNA, 17 nt, Homo sapiens
  source 1..17: mol_type = genomic RNA
ccaaggcggtggcgggg

SEQ ID NO: 2283 - RNA, 22 nt, Homo sapiens
  source 1..22: mol_type = genomic RNA
cagttgggtctaggggtcagga

SEQ ID NO: 2284 - RNA, 22 nt, Homo sapiens
  source 1..22: mol_type = genomic RNA
tcctgacccctagacccaactg

SEQ ID NO: 2285 - RNA, 19 nt, Homo sapiens
  source 1..19: mol_type = genomic RNA
cttggggcatggagtccca

SEQ ID NO: 2286 - RNA, 19 nt, Homo sapiens
  source 1..19: mol_type = genomic RNA
tgggactccatgccccaag

SEQ ID NO: 2287 - RNA, 16 nt, Homo sapiens
  source 1..16: mol_type = genomic RNA
aggaaacagggaccca

SEQ ID NO: 2288 - RNA, 16 nt, Homo sapiens
  source 1..16: mol_type = genomic RNA
tgggtccctgtttcct

SEQ ID NO: 2289 - RNA, 17 nt, Homo sapiens
  source 1..17: mol_type = genomic RNA
gacattcagactacctg

SEQ ID NO: 2290 - RNA, 17 nt, Homo sapiens
  source 1..17: mol_type = genomic RNA
caggtagtctgaatgtc

SEQ ID NO: 2291 - RNA, 18 nt, Homo sapiens
  source 1..18: mol_type = genomic RNA
attctaagtgccttggcc

SEQ ID NO: 2292 - RNA, 18 nt, Homo sapiens
  source 1..18: mol_type = genomic RNA
ggccaaggcacttagaat

SEQ ID NO: 2293 - RNA, 17 nt, Homo sapiens
  source 1..17: mol_type = genomic RNA
actcagtcatggtcatt

SEQ ID NO: 2294 - RNA, 17 nt, Homo sapiens
  source 1..17: mol_type = genomic RNA
aatgaccatgactgagt

SEQ ID NO: 2295 - RNA, 19 nt, Homo sapiens
  source 1..19: mol_type = genomic RNA
ctgtgggctcagctctggg

SEQ ID NO: 2296 - RNA, 19 nt, Homo sapiens
  source 1..19: mol_type = genomic RNA
cccagagctgagcccacag

SEQ ID NO: 2297 - RNA, 16 nt, Homo sapiens
  source 1..16: mol_type = genomic RNA
ctaggaggccttggcc

SEQ ID NO: 2298 - RNA, 16 nt, Homo sapiens
  source 1..16: mol_type = genomic RNA
ggccaaggcctcctag

SEQ ID NO: 2299 - RNA, 16 nt, Homo sapiens
  source 1..16: mol_type = genomic RNA
tccagctcggtggcac

SEQ ID NO: 2300 - RNA, 16 nt, Homo sapiens
  source 1..16: mol_type = genomic RNA
gtgccaccgagctgga

SEQ ID NO: 2301 - RNA, 21 nt, Homo sapiens
  source 1..21: mol_type = genomic RNA
ggctcctcctctcaggatgtg

SEQ ID NO: 2302 - RNA, 21 nt, Homo sapiens
  source 1..21: mol_type = genomic RNA
cacatcctgagaggaggagcc

SEQ ID NO: 2303 - RNA, 21 nt, Homo sapiens
  source 1..21: mol_type = genomic RNA
gcaggcacagacagccctggc

SEQ ID NO: 2304 - RNA, 21 nt, Homo sapiens
  source 1..21: mol_type = genomic RNA
gccagggctgtctgtgcctgc

SEQ ID NO: 2305 - RNA, 20 nt, Homo sapiens
  source 1..20: mol_type = genomic RNA
tcagggagtcaggggagggc

SEQ ID NO: 2306 - RNA, 20 nt, Homo sapiens
  source 1..20: mol_type = genomic RNA
gccctcccctgactccctga

SEQ ID NO: 2307 - RNA, 19 nt, Homo sapiens
  source 1..19: mol_type = genomic RNA
gggggaagaaaaggtgggg

SEQ ID NO: 2308 - RNA, 19 nt, Homo sapiens
  source 1..19: mol_type = genomic RNA
ccccaccttttcttccccc

SEQ ID NO: 2309 - RNA, 18 nt, Homo sapiens
  source 1..18: mol_type = genomic RNA
cattcaactagtgattgt

SEQ ID NO: 2310 - RNA, 18 nt, Homo sapiens
  source 1..18: mol_type = genomic RNA
acaatcactagttgaatg

SEQ ID NO: 2311 - RNA, 18 nt, Homo sapiens
  source 1..18: mol_type = genomic RNA
cagcagtccctccccctg

SEQ ID NO: 2312 - RNA, 18 nt, Homo sapiens
  source 1..18: mol_type = genomic RNA
cagggggagggactgctg

SEQ ID NO: 2313 - RNA, 17 nt, Homo sapiens
  source 1..17: mol_type = genomic RNA
ccaattaccacttcttt

SEQ ID NO: 2314 - RNA, 17 nt, Homo sapiens
  source 1..17: mol_type = genomic RNA
aaagaagtggtaattgg

SEQ ID NO: 2315 - RNA, 17 nt, Homo sapiens
  source 1..17: mol_type = genomic RNA
ctcagtgactcatgtgc

SEQ ID NO: 2316 - RNA, 17 nt, Homo sapiens
  source 1..17: mol_type = genomic RNA
gcacatgagtcactgag

SEQ ID NO: 2317 - RNA, 21 nt, Homo sapiens
  source 1..21: mol_type = genomic RNA
gcagttctgagcacagtacac

SEQ ID NO: 2318 - RNA, 21 nt, Homo sapiens
  source 1..21: mol_type = genomic RNA
gtgtactgtgctcagaactgc

SEQ ID NO: 2319 - RNA, 18 nt, Homo sapiens
  source 1..18: mol_type = genomic RNA
ctagggggtttgcccttg

SEQ ID NO: 2320 - RNA, 18 nt, Homo sapiens
  source 1..18: mol_type = genomic RNA
caagggcaaaccccctag

SEQ ID NO: 2321 - RNA, 16 nt, Homo sapiens
  source 1..16: mol_type = genomic RNA
ctctcctcccggcttc

SEQ ID NO: 2322 - RNA, 16 nt, Homo sapiens
  source 1..16: mol_type = genomic RNA
gaagccgggaggagag

SEQ ID NO: 2323 - RNA, 21 nt, Homo sapiens
  source 1..21: mol_type = genomic RNA
gagtgtagttctgagcagagc

SEQ ID NO: 2324 - RNA, 21 nt, Homo sapiens
  source 1..21: mol_type = genomic RNA
gctctgctcagaactacactc

SEQ ID NO: 2325 - RNA, 18 nt, Homo sapiens
  source 1..18: mol_type = genomic RNA
gggtcccggggagggggg

SEQ ID NO: 2326 - RNA, 18 nt, Homo sapiens
  source 1..18: mol_type = genomic RNA
cccccctccccgggaccc

SEQ ID NO: 2327 - RNA, 18 nt, Homo sapiens
  source 1..18: mol_type = genomic RNA
taaaatttgcatccagga

SEQ ID NO: 2328 - RNA, 18 nt, Homo sapiens
  source 1..18: mol_type = genomic RNA
tcctggatgcaaatttta

SEQ ID NO: 2329 - RNA, 17 nt, Homo sapiens
  source 1..17: mol_type = genomic RNA
tggggctcagcgagttt

SEQ ID NO: 2330 - RNA, 17 nt, Homo sapiens
  source 1..17: mol_type = genomic RNA
aaactcgctgagcccca

SEQ ID NO: 2331 - RNA, 18 nt, Homo sapiens
  source 1..18: mol_type = genomic RNA
gggctcacatcaccccat

SEQ ID NO: 2332 - RNA, 18 nt, Homo sapiens
  source 1..18: mol_type = genomic RNA
atggggtgatgtgagccc

SEQ ID NO: 2333 - RNA, 18 nt, Homo sapiens
  source 1..18: mol_type = genomic RNA
gcggcgagtccgactcat

SEQ ID NO: 2334 - RNA, 18 nt, Homo sapiens
  source 1..18: mol_type = genomic RNA
atgagtcggactcgccgc

SEQ ID NO: 2335 - RNA, 17 nt, Homo sapiens
  source 1..17: mol_type = genomic RNA
accccactcctggtacc

SEQ ID NO: 2336 - RNA, 17 nt, Homo sapiens
  source 1..17: mol_type = genomic RNA
ggtaccaggagtggggt

SEQ ID NO: 2337 - RNA, 19 nt, Homo sapiens
  source 1..19: mol_type = genomic RNA
tctcccttgagggcacttt

SEQ ID NO: 2338 - RNA, 19 nt, Homo sapiens
  source 1..19: mol_type = genomic RNA
aaagtgccctcaagggaga

SEQ ID NO: 2339 - RNA, 17 nt, Homo sapiens
  source 1..17: mol_type = genomic RNA
ttgtctgctgagtttcc

SEQ ID NO: 2340 - RNA, 17 nt, Homo sapiens
  source 1..17: mol_type = genomic RNA
ggaaactcagcagacaa

SEQ ID NO: 2341 - RNA, 19 nt, Homo sapiens
  source 1..19: mol_type = genomic RNA
gcattgtgcagggctatca

SEQ ID NO: 2342 - RNA, 19 nt, Homo sapiens
  source 1..19: mol_type = genomic RNA
tgatagccctgcacaatgc

SEQ ID NO: 2343 - RNA, 19 nt, Homo sapiens
  source 1..19: mol_type = genomic RNA
tgccctcctttcttccctc

SEQ ID NO: 2344 - RNA, 19 nt, Homo sapiens
  source 1..19: mol_type = genomic RNA
gagggaagaaaggagggca

SEQ ID NO: 2345 - RNA, 16 nt, Homo sapiens
  source 1..16: mol_type = genomic RNA
ttcagcaggaacagct

SEQ ID NO: 2346 - RNA, 16 nt, Homo sapiens
  source 1..16: mol_type = genomic RNA
agctgttcctgctgaa

SEQ ID NO: 2347 - RNA, 18 nt, Homo sapiens
  source 1..18: mol_type = genomic RNA
cccctgggccggccttgg

SEQ ID NO: 2348 - RNA, 18 nt, Homo sapiens
  source 1..18: mol_type = genomic RNA
ccaaggccggcccagggg

SEQ ID NO: 2349 - RNA, 17 nt, Homo sapiens
  source 1..17: mol_type = genomic RNA
cagcctgacaggaacag

SEQ ID NO: 2350 - RNA, 17 nt, Homo sapiens
  source 1..17: mol_type = genomic RNA
ctgttcctgtcaggctg

SEQ ID NO: 2351 - RNA, 17 nt, Homo sapiens
  source 1..17: mol_type = genomic RNA
gggagtctacagcaggg

SEQ ID NO: 2352 - RNA, 17 nt, Homo sapiens
  source 1..17: mol_type = genomic RNA
ccctgctgtagactccc

SEQ ID NO: 2353 - RNA, 18 nt, Homo sapiens
  source 1..18: mol_type = genomic RNA
cagtgcaatgttttcctt

SEQ ID NO: 2354 - RNA, 18 nt, Homo sapiens
  source 1..18: mol_type = genomic RNA
aaggaaaacattgcactg

SEQ ID NO: 2355 - RNA, 17 nt, Homo sapiens
  source 1..17: mol_type = genomic RNA
atgtgggctcaggctca

SEQ ID NO: 2356 - RNA, 17 nt, Homo sapiens
  source 1..17: mol_type = genomic RNA
tgagcctgagcccacat

SEQ ID NO: 2357 - RNA, 16 nt, Homo sapiens
  source 1..16: mol_type = genomic RNA
tgccttcctgtctgtg

SEQ ID NO: 2358 - RNA, 16 nt, Homo sapiens
  source 1..16: mol_type = genomic RNA
cacagacaggaaggca

SEQ ID NO: 2359 - RNA, 22 nt, Homo sapiens
  source 1..22: mol_type = genomic RNA
ctgggacaggaggaggaggcag

SEQ ID NO: 2360 - RNA, 22 nt, Homo sapiens
  source 1..22: mol_type = genomic RNA
ctgcctcctcctcctgtcccag

SEQ ID NO: 2361 - RNA, 18 nt, Homo sapiens
  source 1..18: mol_type = genomic RNA
gctggtgacatgagaggc

SEQ ID NO: 2362 - RNA, 18 nt, Homo sapiens
  source 1..18: mol_type = genomic RNA
gcctctcatgtcaccagc

SEQ ID NO: 2363 - RNA, 18 nt, Homo sapiens
  source 1..18: mol_type = genomic RNA
tgggagctggactacttc

SEQ ID NO: 2364 - RNA, 18 nt, Homo sapiens
  source 1..18: mol_type = genomic RNA
gaagtagtccagctccca

SEQ ID NO: 2365 - RNA, 20 nt, Homo sapiens
  source 1..20: mol_type = genomic RNA
tcccactacttcacttgtga

SEQ ID NO: 2366 - RNA, 20 nt, Homo sapiens
  source 1..20: mol_type = genomic RNA
tcacaagtgaagtagtggga

SEQ ID NO: 2367 - RNA, 18 nt, Homo sapiens
  source 1..18: mol_type = genomic RNA
ccagtgtggctcagcgag

SEQ ID NO: 2368 - RNA, 18 nt, Homo sapiens
  source 1..18: mol_type = genomic RNA
ctcgctgagccacactgg

SEQ ID NO: 2369 - RNA, 17 nt, Homo sapiens
  source 1..17: mol_type = genomic RNA
ttctgagctgaggacag

SEQ ID NO: 2370 - RNA, 17 nt, Homo sapiens
  source 1..17: mol_type = genomic RNA
ctgtcctcagctcagaa

SEQ ID NO: 2371 - RNA, 17 nt, Homo sapiens
  source 1..17: mol_type = genomic RNA
ccggcatgtccagggca

SEQ ID NO: 2372 - RNA, 17 nt, Homo sapiens
  source 1..17: mol_type = genomic RNA
tgccctggacatgccgg

SEQ ID NO: 2373 - RNA, 18 nt, Homo sapiens
  source 1..18: mol_type = genomic RNA
cctagacacctccagttc

SEQ ID NO: 2374 - RNA, 18 nt, Homo sapiens
  source 1..18: mol_type = genomic RNA
gaactggaggtgtctagg

SEQ ID NO: 2375 - RNA, 17 nt, Homo sapiens
  source 1..17: mol_type = genomic RNA
tggagagaaaggcagta

SEQ ID NO: 2376 - RNA, 17 nt, Homo sapiens
  source 1..17: mol_type = genomic RNA
tactgcctttctctcca

SEQ ID NO: 2377 - RNA, 19 nt, Homo sapiens
  source 1..19: mol_type = genomic RNA
aatgttttttcctgtttcc

SEQ ID NO: 2378 - RNA, 19 nt, Homo sapiens
  source 1..19: mol_type = genomic RNA
ggaaacaggaaaaaacatt

SEQ ID NO: 2379 - RNA, 18 nt, Homo sapiens
  source 1..18: mol_type = genomic RNA
tccctggagtttcttctt

SEQ ID NO: 2380 - RNA, 18 nt, Homo sapiens
  source 1..18: mol_type = genomic RNA
aagaagaaactccaggga

SEQ ID NO: 2381 - RNA, 18 nt, Homo sapiens
  source 1..18: mol_type = genomic RNA
ctggagtctaggattcca

SEQ ID NO: 2382 - RNA, 18 nt, Homo sapiens
  source 1..18: mol_type = genomic RNA
tggaatcctagactccag

SEQ ID NO: 2383 - RNA, 16 nt, Homo sapiens
  source 1..16: mol_type = genomic RNA
gcagcattcatgtccc

SEQ ID NO: 2384 - RNA, 16 nt, Homo sapiens
  source 1..16: mol_type = genomic RNA
gggacatgaatgctgc

SEQ ID NO: 2385 - RNA, 18 nt, Homo sapiens
  source 1..18: mol_type = genomic RNA
gaaagagagctgagtgtg

SEQ ID NO: 2386 - RNA, 18 nt, Homo sapiens
  source 1..18: mol_type = genomic RNA
cacactcagctctctttc

SEQ ID NO: 2387 - RNA, 19 nt, Homo sapiens
  source 1..19: mol_type = genomic RNA
ggccttgttcctgtcccca

SEQ ID NO: 2388 - RNA, 19 nt, Homo sapiens
  source 1..19: mol_type = genomic RNA
tggggacaggaacaaggcc

SEQ ID NO: 2389 - RNA, 20 nt, Homo sapiens
  source 1..20: mol_type = genomic RNA
agccccctggccccaaaccc

SEQ ID NO: 2390 - RNA, 20 nt, Homo sapiens
  source 1..20: mol_type = genomic RNA
gggtttggggccagggggct

SEQ ID NO: 2391 - RNA, 18 nt, Homo sapiens
  source 1..18: mol_type = genomic RNA
ctctgggaaatgggacag

SEQ ID NO: 2392 - RNA, 18 nt, Homo sapiens
  source 1..18: mol_type = genomic RNA
ctgtcccatttcccagag

SEQ ID NO: 2393 - RNA, 18 nt, Homo sapiens
  source 1..18: mol_type = genomic RNA
ccgctttctgagctggac

SEQ ID NO: 2394 - RNA, 18 nt, Homo sapiens
  source 1..18: mol_type = genomic RNA
gtccagctcagaaagcgg

SEQ ID NO: 2395 - RNA, 17 nt, Homo sapiens
  source 1..17: mol_type = genomic RNA
ggtgaggctagctggtg

SEQ ID NO: 2396 - RNA, 17 nt, Homo sapiens
  source 1..17: mol_type = genomic RNA
caccagctagcctcacc

SEQ ID NO: 2397 - RNA, 17 nt, Homo sapiens
  source 1..17: mol_type = genomic RNA
acattgccagggagttt

SEQ ID NO: 2398 - RNA, 17 nt, Homo sapiens
  source 1..17: mol_type = genomic RNA
aaactccctggcaatgt

SEQ ID NO: 2399 - RNA, 17 nt, Homo sapiens
  source 1..17: mol_type = genomic RNA
cactgtgggtacatgct

SEQ ID NO: 2400 - RNA, 17 nt, Homo sapiens
  source 1..17: mol_type = genomic RNA
agcatgtacccacagtg

SEQ ID NO: 2401 - RNA, 17 nt, Homo sapiens
  source 1..17: mol_type = genomic RNA
tccctgagcaaagccac

SEQ ID NO: 2402 - RNA, 17 nt, Homo sapiens
  source 1..17: mol_type = genomic RNA
gtggctttgctcaggga

SEQ ID NO: 2403 - RNA, 18 nt, Homo sapiens
  source 1..18: mol_type = genomic RNA
gggattctgtagcttcct

SEQ ID NO: 2404 - RNA, 18 nt, Homo sapiens
  source 1..18: mol_type = genomic RNA
aggaagctacagaatccc

SEQ ID NO: 2405 - RNA, 21 nt, Homo sapiens
  source 1..21: mol_type = genomic RNA
ttagcggtggaccgccctgcg

SEQ ID NO: 2406 - RNA, 21 nt, Homo sapiens
  source 1..21: mol_type = genomic RNA
cgcagggcggtccaccgctaa

SEQ ID NO: 2407 - RNA, 21 nt, Homo sapiens
  source 1..21: mol_type = genomic RNA
ctgtgggctcagcgcgtgggg

SEQ ID NO: 2408 - RNA, 21 nt, Homo sapiens
  source 1..21: mol_type = genomic RNA
ccccacgcgctgagcccacag

SEQ ID NO: 2409 - RNA, 18 nt, Homo sapiens
  source 1..18: mol_type = genomic RNA
cagccccacagcctcaga

SEQ ID NO: 2410 - RNA, 18 nt, Homo sapiens
  source 1..18: mol_type = genomic RNA
tctgaggctgtggggctg

SEQ ID NO: 2411 - RNA, 20 nt, Homo sapiens
  source 1..20: mol_type = genomic RNA
ccctgagaccctaaccttaa

SEQ ID NO: 2412 - RNA, 20 nt, Homo sapiens
  source 1..20: mol_type = genomic RNA
ttaaggttagggtctcaggg

SEQ ID NO: 2413 - RNA, 18 nt, Homo sapiens
  source 1..18: mol_type = genomic RNA
ttgcacttgtctcagtga

SEQ ID NO: 2414 - RNA, 18 nt, Homo sapiens
  source 1..18: mol_type = genomic RNA
tcactgagacaagtgcaa

SEQ ID NO: 2415 - RNA, 20 nt, Homo sapiens
  source 1..20: mol_type = genomic RNA
tgttcctctgtctcccagac

SEQ ID NO: 2416 - RNA, 20 nt, Homo sapiens
  source 1..20: mol_type = genomic RNA
gtctgggagacagaggaaca

SEQ ID NO: 2417 - RNA, 19 nt, Homo sapiens
  source 1..19: mol_type = genomic RNA
ggcttgcatgggggactgg

SEQ ID NO: 2418 - RNA, 19 nt, Homo sapiens
  source 1..19: mol_type = genomic RNA
ccagtcccccatgcaagcc

SEQ ID NO: 2419 - RNA, 17 nt, Homo sapiens
  source 1..17: mol_type = genomic RNA
ccagttttcccaggatt

SEQ ID NO: 2420 - RNA, 17 nt, Homo sapiens
  source 1..17: mol_type = genomic RNA
aatcctgggaaaactgg

SEQ ID NO: 2421 - RNA, 19 nt, Homo sapiens
  source 1..19: mol_type = genomic RNA
cctgagaccctagttccac

SEQ ID NO: 2422 - RNA, 19 nt, Homo sapiens
  source 1..19: mol_type = genomic RNA
gtggaactagggtctcagg

SEQ ID NO: 2423 - RNA, 19 nt, Homo sapiens
  source 1..19: mol_type = genomic RNA
cctcagatcagagccttgc

SEQ ID NO: 2424 - RNA, 19 nt, Homo sapiens
  source 1..19: mol_type = genomic RNA
gcaaggctctgatctgagg

SEQ ID NO: 2425 - RNA, 22 nt, Homo sapiens
  source 1..22: mol_type = genomic RNA
cattgcacttgtctcggtctga

SEQ ID NO: 2426 - RNA, 22 nt, Homo sapiens
  source 1..22: mol_type = genomic RNA
tcagaccgagacaagtgcaatg

SEQ ID NO: 2427 - RNA, 21 nt, Homo sapiens
  source 1..21: mol_type = genomic RNA
aggcggagacttgggcaattg

SEQ ID NO: 2428 - RNA, 21 nt, Homo sapiens
  source 1..21: mol_type = genomic RNA
caattgcccaagtctccgcct

SEQ ID NO: 2429 - RNA, 22 nt, Homo sapiens
  source 1..22: mol_type = genomic RNA
cctattcttggttacttgcacg

SEQ ID NO: 2430 - RNA, 22 nt, Homo sapiens
  source 1..22: mol_type = genomic RNA
cgtgcaagtaaccaagaatagg

SEQ ID NO: 2431 - RNA, 19 nt, Homo sapiens
  source 1..19: mol_type = genomic RNA
aatggatttttggagcagg

SEQ ID NO: 2432 - RNA, 19 nt, Homo sapiens
  source 1..19: mol_type = genomic RNA
cctgctccaaaaatccatt

SEQ ID NO: 2433 - RNA, 22 nt, Homo sapiens
  source 1..22: mol_type = genomic RNA
tgcggggctagggctaacagca

SEQ ID NO: 2434 - RNA, 22 nt, Homo sapiens
  source 1..22: mol_type = genomic RNA
tgctgttagccctagccccgca

SEQ ID NO: 2435 - RNA, 22 nt, Homo sapiens
  source 1..22: mol_type = genomic RNA
aaaagtaattgcggattttgcc

SEQ ID NO: 2436 - RNA, 22 nt, Homo sapiens
  source 1..22: mol_type = genomic RNA
ggcaaaatccgcaattactttt

SEQ ID NO: 2437 - RNA, 22 nt, Homo sapiens
  source 1..22: mol_type = genomic RNA
caaaagtaattgtggattttgt

SEQ ID NO: 2438 - RNA, 22 nt, Homo sapiens
  source 1..22: mol_type = genomic RNA
acaaaatccacaattacttttg

SEQ ID NO: 2439 - RNA, 23 nt, Homo sapiens
  source 1..23: mol_type = genomic RNA
taagtgcttccatgttttggtga

SEQ ID NO: 2440 - RNA, 23 nt, Homo sapiens
  source 1..23: mol_type = genomic RNA
tcaccaaaacatggaagcactta

SEQ ID NO: 2441 - RNA, 23 nt, Homo sapiens
  source 1..23: mol_type = genomic RNA
acttaaacgtggatgtacttgct

SEQ ID NO: 2442 - RNA, 23 nt, Homo sapiens
  source 1..23: mol_type = genomic RNA
agcaagtacatccacgtttaagt

SEQ ID NO: 2443 - RNA, 21 nt, Homo sapiens
  source 1..21: mol_type = genomic RNA
ctatacaatctactgtctttc

SEQ ID NO: 2444 - RNA, 21 nt, Homo sapiens
  source 1..21: mol_type = genomic RNA
gaaagacagtagattgtatag

SEQ ID NO: 2445 - RNA, 22 nt, Homo sapiens
  source 1..22: mol_type = genomic RNA
tgaggtagtaggttgtatagtt

SEQ ID NO: 2446 - RNA, 22 nt, Homo sapiens
  source 1..22: mol_type = genomic RNA
aactatacaacctactacctca

SEQ ID NO: 2447 - RNA, 22 nt, Homo sapiens
  source 1..22: mol_type = genomic RNA
ctgtacagcctcctagctttcc

SEQ ID NO: 2448 - RNA, 22 nt, Homo sapiens
  source 1..22: mol_type = genomic RNA
ggaaagctaggaggctgtacag

SEQ ID NO: 2449 - RNA, 20 nt, Homo sapiens
  source 1..20: mol_type = genomic RNA
caccaggcattgtggtctcc

SEQ ID NO: 2450 - RNA, 20 nt, Homo sapiens
  source 1..20: mol_type = genomic RNA
ggagaccacaatgcctggtg

SEQ ID NO: 2451 - RNA, 23 nt, Homo sapiens
  source 1..23: mol_type = genomic RNA
tgagtaccgccatgtctgttggg

SEQ ID NO: 2452 - RNA, 23 nt, Homo sapiens
  source 1..23: mol_type = genomic RNA
cccaacagacatggcggtactca

SEQ ID NO: 2453 - RNA, 22 nt, Homo sapiens
  source 1..22: mol_type = genomic RNA
tacccagagcatgcagtgtgaa

SEQ ID NO: 2454 - RNA, 22 nt, Homo sapiens
  source 1..22: mol_type = genomic RNA
ttcacactgcatgctctgggta

SEQ ID NO: 2455 - RNA, 22 nt, Homo sapiens
  source 1..22: mol_type = genomic RNA
aagtgctgtcatagctgaggtc

SEQ ID NO: 2456 - RNA, 22 nt, Homo sapiens
  source 1..22: mol_type = genomic RNA
gacctcagctatgacagcactt

SEQ ID NO: 2457 - RNA, 23 nt, Homo sapiens
  source 1..23: mol_type = genomic RNA
cactcagccttgagggcactttc

SEQ ID NO: 2458 - RNA, 23 nt, Homo sapiens
  source 1..23: mol_type = genomic RNA
gaaagtgccctcaaggctgagtg

SEQ ID NO: 2459 - RNA, 22 nt, Homo sapiens
  source 1..22: mol_type = genomic RNA
tcgacagcacgacactgccttc

SEQ ID NO: 2460 - RNA, 22 nt, Homo sapiens
  source 1..22: mol_type = genomic RNA
gaaggcagtgtcgtgctgtcga

SEQ ID NO: 2461 - RNA, 22 nt, Homo sapiens
  source 1..22: mol_type = genomic RNA
taggtagtttcctgttgttggg

SEQ ID NO: 2462 - RNA, 22 nt, Homo sapiens
  source 1..22: mol_type = genomic RNA
cccaacaacaggaaactaccta

SEQ ID NO: 2463 - RNA, 21 nt, Homo sapiens
  source 1..21: mol_type = genomic RNA
tacagtactgtgataactgaa

SEQ ID NO: 2464 - RNA, 21 nt, Homo sapiens
  source 1..21: mol_type = genomic RNA
ttcagttatcacagtactgta

SEQ ID NO: 2465 - RNA, 22 nt, Homo sapiens
  source 1..22: mol_type = genomic RNA
cagttatcacagtgctgatgct

SEQ ID NO: 2466 - RNA, 22 nt, Homo sapiens
  source 1..22: mol_type = genomic RNA
agcatcagcactgtgataactg

SEQ ID NO: 2467 - RNA, 23 nt, Homo sapiens
  source 1..23: mol_type = genomic RNA
tgtgcaaatctatgcaaaactga

SEQ ID NO: 2468 - RNA, 23 nt, Homo sapiens
  source 1..23: mol_type = genomic RNA
tcagttttgcatagatttgcaca

SEQ ID NO: 2469 - RNA, 22 nt, Homo sapiens
  source 1..22: mol_type = genomic RNA
agttttgcatagttgcactaca

SEQ ID NO: 2470 - RNA, 22 nt, Homo sapiens
  source 1..22: mol_type = genomic RNA
tgtagtgcaactatgcaaaact

SEQ ID NO: 2471 - RNA, 23 nt, Homo sapiens
  source 1..23: mol_type = genomic RNA
agttttgcaggtttgcatccagc

SEQ ID NO: 2472 - RNA, 23 nt, Homo sapiens
  source 1..23: mol_type = genomic RNA
gctggatgcaaacctgcaaaact

SEQ ID NO: 2473 - RNA, 22 nt, Homo sapiens
  source 1..22: mol_type = genomic RNA
agttttgcaggtttgcatttca

SEQ ID NO: 2474 - RNA, 22 nt, Homo sapiens
  source 1..22: mol_type = genomic RNA
tgaaatgcaaacctgcaaaact

SEQ ID NO: 2475 - RNA, 23 nt, Homo sapiens
  source 1..23: mol_type = genomic RNA
tgtgcaaatccatgcaaaactga

SEQ ID NO: 2476 - RNA, 23 nt, Homo sapiens
  source 1..23: mol_type = genomic RNA
tcagttttgcatggatttgcaca

SEQ ID NO: 2477 - RNA, 23 nt, Homo sapiens
  source 1..23: mol_type = genomic RNA
tactgcatcaggaactgattgga

SEQ ID NO: 2478 - RNA, 23 nt, Homo sapiens
  source 1..23: mol_type = genomic RNA
tccaatcagttcctgatgcagta

SEQ ID NO: 2479 - RNA, 22 nt, Homo sapiens
  source 1..22: mol_type = genomic RNA
atggttccgtcaagcaccatgg

SEQ ID NO: 2480 - RNA, 22 nt, Homo sapiens
  source 1..22: mol_type = genomic RNA
ccatggtgcttgacggaaccat

SEQ ID NO: 2481 - RNA, 21 nt, Homo sapiens
  source 1..21: mol_type = genomic RNA
agctacatctggctactgggt

SEQ ID NO: 2482 - RNA, 21 nt, Homo sapiens
  source 1..21: mol_type = genomic RNA
acccagtagccagatgtagct

SEQ ID NO: 2483 - RNA, 22 nt, Homo sapiens
  source 1..22: mol_type = genomic RNA
ctcagtagccagtgtagatcct

SEQ ID NO: 2484 - RNA, 22 nt, Homo sapiens
  source 1..22: mol_type = genomic RNA
aggatctacactggctactgag

SEQ ID NO: 2485 - RNA, 22 nt, Homo sapiens
  source 1..22: mol_type = genomic RNA
ttatcagaatctccaggggtac

SEQ ID NO: 2486 - RNA, 22 nt, Homo sapiens
  source 1..22: mol_type = genomic RNA
gtacccctggagattctgataa

SEQ ID NO: 2487 - RNA, 23 nt, Homo sapiens
  source 1..23: mol_type = genomic RNA
atcaacagacattaattgggcgc

SEQ ID NO: 2488 - RNA, 23 nt, Homo sapiens
  source 1..23: mol_type = genomic RNA
gcgcccaattaatgtctgttgat

SEQ ID NO: 2489 - RNA, 21 nt, Homo sapiens
  source 1..21: mol_type = genomic RNA
caaaacgtgaggcgctgctat

SEQ ID NO: 2490 - RNA, 21 nt, Homo sapiens
  source 1..21: mol_type = genomic RNA
atagcagcgcctcacgttttg

SEQ ID NO: 2491 - RNA, 22 nt, Homo sapiens
  source 1..22: mol_type = genomic RNA
cagcagcaattcatgttttgaa

SEQ ID NO: 2492 - RNA, 22 nt, Homo sapiens
  source 1..22: mol_type = genomic RNA
ttcaaaacatgaattgctgctg

SEQ ID NO: 2493 - RNA, 18 nt, Homo sapiens
  source 1..18: mol_type = genomic RNA
ttcacagggaggtgtcat

SEQ ID NO: 2494 - RNA, 18 nt, Homo sapiens
  source 1..18: mol_type = genomic RNA
atgacacctccctgtgaa

SEQ ID NO: 2495 - RNA, 20 nt, Homo sapiens
  source 1..20: mol_type = genomic RNA
gcggagagagaatggggagc

SEQ ID NO: 2496 - RNA, 20 nt, Homo sapiens
  source 1..20: mol_type = genomic RNA
gctccccattctctctccgc

SEQ ID NO: 2497 - RNA, 21 nt, Homo sapiens
  source 1..21: mol_type = genomic RNA
cctgcgagtctccggcggtgg

SEQ ID NO: 2498 - RNA, 21 nt, Homo sapiens
  source 1..21: mol_type = genomic RNA
ccaccgccggagactcgcagg

SEQ ID NO: 2499 - RNA, 21 nt, Homo sapiens
  source 1..21: mol_type = genomic RNA
gggctagggcctgctgccccc

SEQ ID NO: 2500 - RNA, 21 nt, Homo sapiens
  source 1..21: mol_type = genomic RNA
gggggcagcaggccctagccc

SEQ ID NO: 2501 - RNA, 19 nt, Homo sapiens
  source 1..19: mol_type = genomic RNA
ttctgctgccggccaaggc

SEQ ID NO: 2502 - RNA, 19 nt, Homo sapiens
  source 1..19: mol_type = genomic RNA
gccttggccggcagcagaa

SEQ ID NO: 2503 - RNA, 22 nt, Homo sapiens
  source 1..22: mol_type = genomic RNA
tcctcatcacactgcaccttag

SEQ ID NO: 2504 - RNA, 22 nt, Homo sapiens
  source 1..22: mol_type = genomic RNA
ctaaggtgcagtgtgatgagga

SEQ ID NO: 2505 - RNA, 20 nt, Homo sapiens
  source 1..20: mol_type = genomic RNA
ggtagtgagttatcagctac

SEQ ID NO: 2506 - RNA, 20 nt, Homo sapiens
  source 1..20: mol_type = genomic RNA
gtagctgataactcactacc

SEQ ID NO: 2507 - RNA, 20 nt, Homo sapiens
  source 1..20: mol_type = genomic RNA
gatattcagaggctaggtgg

SEQ ID NO: 2508 - RNA, 20 nt, Homo sapiens
  source 1..20: mol_type = genomic RNA
ccacctagcctctgaatatc

SEQ ID NO: 2509 - RNA, 21 nt, Homo sapiens
  source 1..21: mol_type = genomic RNA
acggcccaggcggcattggtg

SEQ ID NO: 2510 - RNA, 21 nt, Homo sapiens
  source 1..21: mol_type = genomic RNA
caccaatgccgcctgggccgt

SEQ ID NO: 2511 - RNA, 21 nt, Homo sapiens
  source 1..21: mol_type = genomic RNA
agcatgacagaggagaggtgg

SEQ ID NO: 2512 - RNA, 21 nt, Homo sapiens
  source 1..21: mol_type = genomic RNA
ccacctctcctctgtcatgct

SEQ ID NO: 2513 - RNA, 21 nt, Homo sapiens
  source 1..21: mol_type = genomic RNA
gggaagagctgtacggccttc

SEQ ID NO: 2514 - RNA, 21 nt, Homo sapiens
  source 1..21: mol_type = genomic RNA
gaaggccgtacagctcttccc

SEQ ID NO: 2515 - RNA, 19 nt, Homo sapiens
  source 1..19: mol_type = genomic RNA
ccgcctgagctagctgtgg

SEQ ID NO: 2516 - RNA, 19 nt, Homo sapiens
  source 1..19: mol_type = genomic RNA
ccacagctagctcaggcgg

SEQ ID NO: 2517 - RNA, 24 nt, Homo sapiens
  source 1..24: mol_type = genomic RNA
ttggaagcttggaccaactagctg

SEQ ID NO: 2518 - RNA, 24 nt, Homo sapiens
  source 1..24: mol_type = genomic RNA
cagctagttggtccaagcttccaa

SEQ ID NO: 2519 - RNA, 19 nt, Homo sapiens
  source 1..19: mol_type = genomic RNA
tctagtgcgggcgttcccg

SEQ ID NO: 2520 - RNA, 19 nt, Homo sapiens
  source 1..19: mol_type = genomic RNA
cgggaacgcccgcactaga

SEQ ID NO: 2521 - RNA, 24 nt, Homo sapiens
  source 1..24: mol_type = genomic RNA
aggagcagtgccggccaaggcgcc

SEQ ID NO: 2522 - RNA, 24 nt, Homo sapiens
  source 1..24: mol_type = genomic RNA
ggcgccttggccggcactgctcct

SEQ ID NO: 2523 - RNA, 19 nt, Homo sapiens
  source 1..19: mol_type = genomic RNA
gaatacgtctggttgatcc

SEQ ID NO: 2524 - RNA, 19 nt, Homo sapiens
  source 1..19: mol_type = genomic RNA
ggatcaaccagacgtattc

SEQ ID NO: 2525 - RNA, 20 nt, Homo sapiens
  source 1..20: mol_type = genomic RNA
cttatatcagaggctgtggg

SEQ ID NO: 2526 - RNA, 20 nt, Homo sapiens
  source 1..20: mol_type = genomic RNA
cccacagcctctgatataag

SEQ ID NO: 2527 - RNA, 20 nt, Homo sapiens
  source 1..20: mol_type = genomic RNA
ttccgccagtcggtggccgg

SEQ ID NO: 2528 - RNA, 20 nt, Homo sapiens
  source 1..20: mol_type = genomic RNA
ccggccaccgactggcggaa

SEQ ID NO: 2529 - RNA, 19 nt, Homo sapiens
  source 1..19: mol_type = genomic RNA
aaggggctgggggagcaca

SEQ ID NO: 2530 - RNA, 19 nt, Homo sapiens
  source 1..19: mol_type = genomic RNA
tgtgctcccccagcccctt

SEQ ID NO: 2531 - RNA, 23 nt, Homo sapiens
  source 1..23: mol_type = genomic RNA
aggttgggatcggttgcaatgct

SEQ ID NO: 2532 - RNA, 23 nt, Homo sapiens
  source 1..23: mol_type = genomic RNA
agcattgcaaccgatcccaacct

SEQ ID NO: 2533 - RNA, 22 nt, Homo sapiens
  source 1..22: mol_type = genomic RNA
gggtggggatttgttgcattac

SEQ ID NO: 2534 - RNA, 22 nt, Homo sapiens
  source 1..22: mol_type = genomic RNA
gtaatgcaacaaatccccaccc

SEQ ID NO: 2535 - RNA, 22 nt, Homo sapiens
  source 1..22: mol_type = genomic RNA
tattgcacttgtcccggcctgt

SEQ ID NO: 2536 - RNA, 22 nt, Homo sapiens
  source 1..22: mol_type = genomic RNA
acaggccgggacaagtgcaata

SEQ ID NO: 2537 - RNA, 22 nt, Homo sapiens
  source 1..22: mol_type = genomic RNA
tattgcactcgtcccggcctcc

SEQ ID NO: 2538 - RNA, 22 nt, Homo sapiens
  source 1..22: mol_type = genomic RNA
ggaggccgggacgagtgcaata

SEQ ID NO: 2539 - RNA, 22 nt, Homo sapiens
  source 1..22: mol_type = genomic RNA
agggacgggacgcggtgcagtg

SEQ ID NO: 2540 - RNA, 22 nt, Homo sapiens
  source 1..22: mol_type = genomic RNA
cactgcaccgcgtcccgtccct

SEQ ID NO: 2541 - RNA, 21 nt, Homo sapiens
  source 1..21: mol_type = genomic RNA
atcacattgccagggatttcc

SEQ ID NO: 2542 - RNA, 21 nt, Homo sapiens
  source 1..21: mol_type = genomic RNA
ggaaatccctggcaatgtgat

SEQ ID NO: 2543 - RNA, 22 nt, Homo sapiens
  source 1..22: mol_type = genomic RNA
ggggttcctggggatgggattt

SEQ ID NO: 2544 - RNA, 22 nt, Homo sapiens
  source 1..22: mol_type = genomic RNA
aaatcccatccccaggaacccc

SEQ ID NO: 2545 - RNA, 22 nt, Homo sapiens
  source 1..22: mol_type = genomic RNA
actgcagtgaaggcacttgtag

SEQ ID NO: 2546 - RNA, 22 nt, Homo sapiens
  source 1..22: mol_type = genomic RNA
ctacaagtgccttcactgcagt

SEQ ID NO: 2547 - RNA, 23 nt, Homo sapiens
  source 1..23: mol_type = genomic RNA
agctacattgtctgctgggtttc

SEQ ID NO: 2548 - RNA, 23 nt, Homo sapiens
  source 1..23: mol_type = genomic RNA
gaaacccagcagacaatgtagct

SEQ ID NO: 2549 - RNA, 22 nt, Homo sapiens
  source 1..22: mol_type = genomic RNA
acctggcatacaatgtagattt

SEQ ID NO: 2550 - RNA, 22 nt, Homo sapiens
  source 1..22: mol_type = genomic RNA
aaatctacattgtatgccaggt

SEQ ID NO: 2551 - RNA, 22 nt, Homo sapiens
  source 1..22: mol_type = genomic RNA
tcgtaccgtgagtaataatgcg

SEQ ID NO: 2552 - RNA, 22 nt, Homo sapiens
  source 1..22: mol_type = genomic RNA
cgcattattactcacggtacga

SEQ ID NO: 2553 - RNA, 21 nt, Homo sapiens
  source 1..21: mol_type = genomic RNA
cattattacttttggtacgcg

SEQ ID NO: 2554 - RNA, 21 nt, Homo sapiens
  source 1..21: mol_type = genomic RNA
cgcgtaccaaaagtaataatg

SEQ ID NO: 2555 - RNA, 23 nt, Homo sapiens
  source 1..23: mol_type = genomic RNA
tactccagagggcgtcactcatg

SEQ ID NO: 2556 - RNA, 23 nt, Homo sapiens
  source 1..23: mol_type = genomic RNA
catgagtgacgccctctggagta

SEQ ID NO: 2557 - RNA, 21 nt, Homo sapiens
  source 1..21: mol_type = genomic RNA
tcccacgttgtggcccagcag

SEQ ID NO: 2558 - RNA, 21 nt, Homo sapiens
  source 1..21: mol_type = genomic RNA
ctgctgggccacaacgtggga

SEQ ID NO: 2559 - RNA, 23 nt, Homo sapiens
  source 1..23: mol_type = genomic RNA
cctcaccaccccttctgcctgca

SEQ ID NO: 2560 - RNA, 23 nt, Homo sapiens
  source 1..23: mol_type = genomic RNA
tgcaggcagaaggggtggtgagg

SEQ ID NO: 2561 - RNA, 24 nt, Homo sapiens
  source 1..24: mol_type = genomic RNA
ctgcaggcagaagtggggctgaca

SEQ ID NO: 2562 - RNA, 24 nt, Homo sapiens
  source 1..24: mol_type = genomic RNA
tgtcagccccacttctgcctgcag

SEQ ID NO: 2563 - RNA, 21 nt, Homo sapiens
  source 1..21: mol_type = genomic RNA
ccaaaccagtcgtgcctgtgg

SEQ ID NO: 2564 - RNA, 21 nt, Homo sapiens
  source 1..21: mol_type = genomic RNA
ccacaggcacgactggtttgg

SEQ ID NO: 2565 - RNA, 22 nt, Homo sapiens
  source 1..22: mol_type = genomic RNA
ctcaaaccggctgtgcctgtgg

SEQ ID NO: 2566 - RNA, 22 nt, Homo sapiens
  source 1..22: mol_type = genomic RNA
ccacaggcacagccggtttgag

SEQ ID NO: 2567 - RNA, 21 nt, Homo sapiens
  source 1..21: mol_type = genomic RNA
acaggcacgactggtttggca

SEQ ID NO: 2568 - RNA, 21 nt, Homo sapiens
  source 1..21: mol_type = genomic RNA
tgccaaaccagtcgtgcctgt

SEQ ID NO: 2569 - RNA, 22 nt, Homo sapiens
  source 1..22: mol_type = genomic RNA
tccgaactctccattcctctgc

SEQ ID NO: 2570 - RNA, 22 nt, Homo sapiens
  source 1..22: mol_type = genomic RNA
gcagaggaatggagagttcgga

SEQ ID NO: 2571 - RNA, 20 nt, Homo sapiens
  source 1..20: mol_type = genomic RNA
tgggaatgggggtaagggcc

SEQ ID NO: 2572 - RNA, 20 nt, Homo sapiens
  source 1..20: mol_type = genomic RNA
ggcccttacccccattccca

SEQ ID NO: 2573 - RNA, 22 nt, Homo sapiens
  source 1..22: mol_type = genomic RNA
aggcgatgtggggatgtagaga

SEQ ID NO: 2574 - RNA, 22 nt, Homo sapiens
  source 1..22: mol_type = genomic RNA
tctctacatccccacatcgcct

SEQ ID NO: 2575 - RNA, 21 nt, Homo sapiens
  source 1..21: mol_type = genomic RNA
tagtggtcagagggcttatga

SEQ ID NO: 2576 - RNA, 21 nt, Homo sapiens
  source 1..21: mol_type = genomic RNA
tcataagccctctgaccacta

SEQ ID NO: 2577 - RNA, 22 nt, Homo sapiens
  source 1..22: mol_type = genomic RNA
tctgacatcagtgattctcctg

SEQ ID NO: 2578 - RNA, 22 nt, Homo sapiens
  source 1..22: mol_type = genomic RNA
caggagaatcactgatgtcaga

SEQ ID NO: 2579 - RNA, 22 nt, Homo sapiens
  source 1..22: mol_type = genomic RNA
cgcgcctgcaggaactggtaga

SEQ ID NO: 2580 - RNA, 22 nt, Homo sapiens
  source 1..22: mol_type = genomic RNA
tctaccagttcctgcaggcgcg

SEQ ID NO: 2581 - RNA, 23 nt, Homo sapiens
  source 1..23: mol_type = genomic RNA
tgggcaggggcttattgtaggag

SEQ ID NO: 2582 - RNA, 23 nt, Homo sapiens
  source 1..23: mol_type = genomic RNA
ctcctacaataagcccctgccca

SEQ ID NO: 2583 - RNA, 22 nt, Homo sapiens
  source 1..22: mol_type = genomic RNA
tgcaggggtcgggtgggccagg

SEQ ID NO: 2584 - RNA, 22 nt, Homo sapiens
  source 1..22: mol_type = genomic RNA
cctggcccacccgacccctgca

SEQ ID NO: 2585 - RNA, 20 nt, Homo sapiens
  source 1..20: mol_type = genomic RNA
aggcgcacccgaccacatgc

SEQ ID NO: 2586 - RNA, 20 nt, Homo sapiens
  source 1..20: mol_type = genomic RNA
gcatgtggtcgggtgcgcct

SEQ ID NO: 2587 - RNA, 22 nt, Homo sapiens
  source 1..22: mol_type = genomic RNA
atagtccgagtaacgtcggggc

SEQ ID NO: 2588 - RNA, 22 nt, Homo sapiens
  source 1..22: mol_type = genomic RNA
gccccgacgttactcggactat

SEQ ID NO: 2589 - RNA, 23 nt, Homo sapiens
  source 1..23: mol_type = genomic RNA
ctgggcccgcggcgggcgtgggg

SEQ ID NO: 2590 - RNA, 23 nt, Homo sapiens
  source 1..23: mol_type = genomic RNA
ccccacgcccgccgcgggcccag

SEQ ID NO: 2591 - RNA, 21 nt, Homo sapiens
  source 1..21: mol_type = genomic RNA
tacttggaaaggcatcagttg

SEQ ID NO: 2592 - RNA, 21 nt, Homo sapiens
  source 1..21: mol_type = genomic RNA
caactgatgcctttccaagta

SEQ ID NO: 2593 - RNA, 22 nt, Homo sapiens
  source 1..22: mol_type = genomic RNA
tgcaacgaacctgagccactga

SEQ ID NO: 2594 - RNA, 22 nt, Homo sapiens
  source 1..22: mol_type = genomic RNA
tcagtggctcaggttcgttgca

SEQ ID NO: 2595 - RNA, 22 nt, Homo sapiens
  source 1..22: mol_type = genomic RNA
tgcaacttacctgagtcattga

SEQ ID NO: 2596 - RNA, 22 nt, Homo sapiens
  source 1..22: mol_type = genomic RNA
tcaatgactcaggtaagttgca

SEQ ID NO: 2597 - RNA, 21 nt, Homo sapiens
  source 1..21: mol_type = genomic RNA
cactgtgtcctttctgcgtag

SEQ ID NO: 2598 - RNA, 21 nt, Homo sapiens
  source 1..21: mol_type = genomic RNA
ctacgcagaaaggacacagtg

SEQ ID NO: 2599 - RNA, 22 nt, Homo sapiens
  source 1..22: mol_type = genomic RNA
cactggctcctttctgggtaga

SEQ ID NO: 2600 - RNA, 22 nt, Homo sapiens
  source 1..22: mol_type = genomic RNA
tctacccagaaaggagccagtg

SEQ ID NO: 2601 - RNA, 22 nt, Homo sapiens
  source 1..22: mol_type = genomic RNA
cactgtttcctttctgagtgga

SEQ ID NO: 2602 - RNA, 22 nt, Homo sapiens
  source 1..22: mol_type = genomic RNA
tccactcagaaaggaaacagtg

SEQ ID NO: 2603 - RNA, 21 nt, Homo sapiens
  source 1..21: mol_type = genomic RNA
tattcagaaaggtgccagtca

SEQ ID NO: 2604 - RNA, 21 nt, Homo sapiens
  source 1..21: mol_type = genomic RNA
tgactggcacctttctgaata

SEQ ID NO: 2605 - RNA, 20 nt, Homo sapiens
  source 1..20: mol_type = genomic RNA
attcctagaaattgttcata

SEQ ID NO: 2606 - RNA, 20 nt, Homo sapiens
  source 1..20: mol_type = genomic RNA
tatgaacaatttctaggaat

SEQ ID NO: 2607 - RNA, 22 nt, Homo sapiens
  source 1..22: mol_type = genomic RNA
taatactgtctggtaaaaccgt

SEQ ID NO: 2608 - RNA, 22 nt, Homo sapiens
  source 1..22: mol_type = genomic RNA
acggttttaccagacagtatta

SEQ ID NO: 2609 - RNA, 22 nt, Homo sapiens
  source 1..22: mol_type = genomic RNA
tgaaacatacacgggaaacctc

SEQ ID NO: 2610 - RNA, 22 nt, Homo sapiens
  source 1..22: mol_type = genomic RNA
gaggtttcccgtgtatgtttca

SEQ ID NO: 2611 - RNA, 22 nt, Homo sapiens
  source 1..22: mol_type = genomic RNA
ctatacaacctactgccttccc

SEQ ID NO: 2612 - RNA, 22 nt, Homo sapiens
  source 1..22: mol_type = genomic RNA
gggaaggcagtaggttgtatag

SEQ ID NO: 2613 - RNA, 22 nt, Homo sapiens
  source 1..22: mol_type = genomic RNA
tgaggtagtaggttgtgtggtt

SEQ ID NO: 2614 - RNA, 22 nt, Homo sapiens
  source 1..22: mol_type = genomic RNA
aaccacacaacctactacctca

SEQ ID NO: 2615 - RNA, 22 nt, Homo sapiens
  source 1..22: mol_type = genomic RNA
taacactgtctggtaacgatgt

SEQ ID NO: 2616 - RNA, 22 nt, Homo sapiens
  source 1..22: mol_type = genomic RNA
acatcgttaccagacagtgtta

SEQ ID NO: 2617 - RNA, 22 nt, Homo sapiens
  source 1..22: mol_type = genomic RNA
catcttaccggacagtgctgga

SEQ ID NO: 2618 - RNA, 22 nt, Homo sapiens
  source 1..22: mol_type = genomic RNA
tccagcactgtccggtaagatg

SEQ ID NO: 2619 - RNA, 22 nt, Homo sapiens
  source 1..22: mol_type = genomic RNA
taatactgcctggtaatgatga

SEQ ID NO: 2620 - RNA, 22 nt, Homo sapiens
  source 1..22: mol_type = genomic RNA
tcatcattaccaggcagtatta

SEQ ID NO: 2621 - RNA, 22 nt, Homo sapiens
  source 1..22: mol_type = genomic RNA
catcttactgggcagcattgga

SEQ ID NO: 2622 - RNA, 22 nt, Homo sapiens
  source 1..22: mol_type = genomic RNA
tccaatgctgcccagtaagatg

SEQ ID NO: 2623 - RNA, 23 nt, Homo sapiens
  source 1..23: mol_type = genomic RNA
taatactgccgggtaatgatgga

SEQ ID NO: 2624 - RNA, 23 nt, Homo sapiens
  source 1..23: mol_type = genomic RNA
tccatcattacccggcagtatta

SEQ ID NO: 2625 - RNA, 22 nt, Homo sapiens
  source 1..22: mol_type = genomic RNA
cgtcttacccagcagtgtttgg

SEQ ID NO: 2626 - RNA, 22 nt, Homo sapiens
  source 1..22: mol_type = genomic RNA
ccaaacactgctgggtaagacg

SEQ ID NO: 2627 - RNA, 22 nt, Homo sapiens
  source 1..22: mol_type = genomic RNA
tccagcatcagtgattttgttg

SEQ ID NO: 2628 - RNA, 22 nt, Homo sapiens
  source 1..22: mol_type = genomic RNA
caacaaaatcactgatgctgga

SEQ ID NO: 2629 - RNA, 20 nt, Homo sapiens
  source 1..20: mol_type = genomic RNA
tacagtatagatgatgtact

SEQ ID NO: 2630 - RNA, 20 nt, Homo sapiens
  source 1..20: mol_type = genomic RNA
agtacatcatctatactgta

SEQ ID NO: 2631 - RNA, 22 nt, Homo sapiens
  source 1..22: mol_type = genomic RNA
ggatatcatcatatactgtaag

SEQ ID NO: 2632 - RNA, 22 nt, Homo sapiens
  source 1..22: mol_type = genomic RNA
cttacagtatatgatgatatcc

SEQ ID NO: 2633 - RNA, 21 nt, Homo sapiens
  source 1..21: mol_type = genomic RNA
cggggcagctcagtacaggat

SEQ ID NO: 2634 - RNA, 21 nt, Homo sapiens
  source 1..21: mol_type = genomic RNA
atcctgtactgagctgccccg

SEQ ID NO: 2635 - RNA, 21 nt, Homo sapiens
  source 1..21: mol_type = genomic RNA
tccttctgctccgtcccccag

SEQ ID NO: 2636 - RNA, 21 nt, Homo sapiens
  source 1..21: mol_type = genomic RNA
ctgggggacggagcagaagga

SEQ ID NO: 2637 - RNA, 21 nt, Homo sapiens
  source 1..21: mol_type = genomic RNA
cgggggcggggccgaagcgcg

SEQ ID NO: 2638 - RNA, 21 nt, Homo sapiens
  source 1..21: mol_type = genomic RNA
cgcgcttcggccccgcccccg

SEQ ID NO: 2639 - RNA, 21 nt, Homo sapiens
  source 1..21: mol_type = genomic RNA
tcctgcgcgtcccagatgccc

SEQ ID NO: 2640 - RNA, 21 nt, Homo sapiens
  source 1..21: mol_type = genomic RNA
gggcatctgggacgcgcagga

SEQ ID NO: 2641 - RNA, 22 nt, Homo sapiens
  source 1..22: mol_type = genomic RNA
catcagaattcatggaggctag

SEQ ID NO: 2642 - RNA, 22 nt, Homo sapiens
  source 1..22: mol_type = genomic RNA
ctagcctccatgaattctgatg

SEQ ID NO: 2643 - RNA, 22 nt, Homo sapiens
  source 1..22: mol_type = genomic RNA
agcttccatgactcctgatgga

SEQ ID NO: 2644 - RNA, 22 nt, Homo sapiens
  source 1..22: mol_type = genomic RNA
tccatcaggagtcatggaagct

SEQ ID NO: 2645 - RNA, 21 nt, Homo sapiens
  source 1..21: mol_type = genomic RNA
tgacagcgccctgcctggctc

SEQ ID NO: 2646 - RNA, 21 nt, Homo sapiens
  source 1..21: mol_type = genomic RNA
gagccaggcagggcgctgtca

SEQ ID NO: 2647 - RNA, 24 nt, Homo sapiens
  source 1..24: mol_type = genomic RNA
agcgcgggctgagcgctgccagtc

SEQ ID NO: 2648 - RNA, 24 nt, Homo sapiens
  source 1..24: mol_type = genomic RNA
gactggcagcgctcagcccgcgct

SEQ ID NO: 2649 - RNA, 22 nt, Homo sapiens
  source 1..22: mol_type = genomic RNA
ctgggaggtgtgatatcgtggt

SEQ ID NO: 2650 - RNA, 22 nt, Homo sapiens
  source 1..22: mol_type = genomic RNA
accacgatatcacacctcccag

SEQ ID NO: 2651 - RNA, 22 nt, Homo sapiens
  source 1..22: mol_type = genomic RNA
tgtgatatcatggttcctggga

SEQ ID NO: 2652 - RNA, 22 nt, Homo sapiens
  source 1..22: mol_type = genomic RNA
tcccaggaaccatgatatcaca

SEQ ID NO: 2653 - RNA, 22 nt, Homo sapiens
  source 1..22: mol_type = genomic RNA
aggtgctccaggctggctcaca

SEQ ID NO: 2654 - RNA, 22 nt, Homo sapiens
  source 1..22: mol_type = genomic RNA
tgtgagccagcctggagcacct

SEQ ID NO: 2655 - RNA, 22 nt, Homo sapiens
  source 1..22: mol_type = genomic RNA
gagcaatgtaggtagactgttt

SEQ ID NO: 2656 - RNA, 22 nt, Homo sapiens
  source 1..22: mol_type = genomic RNA
aaacagtctacctacattgctc

SEQ ID NO: 2657 - RNA, 22 nt, Homo sapiens
  source 1..22: mol_type = genomic RNA
tgtcctctagggcctgcagtct

SEQ ID NO: 2658 - RNA, 22 nt, Homo sapiens
  source 1..22: mol_type = genomic RNA
agactgcaggccctagaggaca

SEQ ID NO: 2659 - RNA, 20 nt, Homo sapiens
  source 1..20: mol_type = genomic RNA
aaaggcataaaaccaagaca

SEQ ID NO: 2660 - RNA, 20 nt, Homo sapiens
  source 1..20: mol_type = genomic RNA
tgtcttggttttatgccttt

SEQ ID NO: 2661 - RNA, 21 nt, Homo sapiens
  source 1..21: mol_type = genomic RNA
taacgcataatatggacatgt

SEQ ID NO: 2662 - RNA, 21 nt, Homo sapiens
  source 1..21: mol_type = genomic RNA
acatgtccatattatgcgtta

SEQ ID NO: 2663 - RNA, 22 nt, Homo sapiens
  source 1..22: mol_type = genomic RNA
ttgaggaaaagatggtcttatt

SEQ ID NO: 2664 - RNA, 22 nt, Homo sapiens
  source 1..22: mol_type = genomic RNA
aataagaccatcttttcctcaa

SEQ ID NO: 2665 - RNA, 26 nt, Homo sapiens
  source 1..26: mol_type = genomic RNA
aagaggaagaaatggctggttctcag

SEQ ID NO: 2666 - RNA, 26 nt, Homo sapiens
  source 1..26: mol_type = genomic RNA
ctgagaaccagccatttcttcctctt

SEQ ID NO: 2667 - RNA, 20 nt, Homo sapiens
  source 1..20: mol_type = genomic RNA
gctcggactgagcaggtggg

SEQ ID NO: 2668 - RNA, 20 nt, Homo sapiens
  source 1..20: mol_type = genomic RNA
cccacctgctcagtccgagc

SEQ ID NO: 2669 - RNA, 21 nt, Homo sapiens
  source 1..21: mol_type = genomic RNA
acagggccgcagatggagact

SEQ ID NO: 2670 - RNA, 21 nt, Homo sapiens
  source 1..21: mol_type = genomic RNA
agtctccatctgcggccctgt

SEQ ID NO: 2671 - RNA, 21 nt, Homo sapiens
  source 1..21: mol_type = genomic RNA
gcagagaacaaaggactcagt

SEQ ID NO: 2672 - RNA, 21 nt, Homo sapiens
  source 1..21: mol_type = genomic RNA
actgagtcctttgttctctgc

SEQ ID NO: 2673 - RNA, 22 nt, Homo sapiens
  source 1..22: mol_type = genomic RNA
actgattatcttaactctctga

SEQ ID NO: 2674 - RNA, 22 nt, Homo sapiens
  source 1..22: mol_type = genomic RNA
tcagagagttaagataatcagt

SEQ ID NO: 2675 - RNA, 23 nt, Homo sapiens
  source 1..23: mol_type = genomic RNA
tctctgagtaccatatgccttgt

SEQ ID NO: 2676 - RNA, 23 nt, Homo sapiens
  source 1..23: mol_type = genomic RNA
acaaggcatatggtactcagaga

SEQ ID NO: 2677 - RNA, 22 nt, Homo sapiens
  source 1..22: mol_type = genomic RNA
aactagtaatgttggattaggg

SEQ ID NO: 2678 - RNA, 22 nt, Homo sapiens
  source 1..22: mol_type = genomic RNA
ccctaatccaacattactagtt

SEQ ID NO: 2679 - RNA, 22 nt, Homo sapiens
  source 1..22: mol_type = genomic RNA
atatgtatatgtgactgctact

SEQ ID NO: 2680 - RNA, 22 nt, Homo sapiens
  source 1..22: mol_type = genomic RNA
agtagcagtcacatatacatat

SEQ ID NO: 2681 - RNA, 21 nt, Homo sapiens
  source 1..21: mol_type = genomic RNA
tggccaaaaagcaggcagaga

SEQ ID NO: 2682 - RNA, 21 nt, Homo sapiens
  source 1..21: mol_type = genomic RNA
tctctgcctgctttttggcca

SEQ ID NO: 2683 - RNA, 22 nt, Homo sapiens
  source 1..22: mol_type = genomic RNA
ggaggaaccttggagcttcggc

SEQ ID NO: 2684 - RNA, 22 nt, Homo sapiens
  source 1..22: mol_type = genomic RNA
gccgaagctccaaggttcctcc

SEQ ID NO: 2685 - RNA, 23 nt, Homo sapiens
  source 1..23: mol_type = genomic RNA
gaggctgatgtgagtagaccact

SEQ ID NO: 2686 - RNA, 23 nt, Homo sapiens
  source 1..23: mol_type = genomic RNA
agtggtctactcacatcagcctc

SEQ ID NO: 2687 - RNA, 21 nt, Homo sapiens
  source 1..21: mol_type = genomic RNA
ctgtcctaaggttgttgagtt

SEQ ID NO: 2688 - RNA, 21 nt, Homo sapiens
  source 1..21: mol_type = genomic RNA
aactcaacaaccttaggacag

SEQ ID NO: 2689 - RNA, 21 nt, Homo sapiens
  source 1..21: mol_type = genomic RNA
tcttcaacctcaggacttgca

SEQ ID NO: 2690 - RNA, 21 nt, Homo sapiens
  source 1..21: mol_type = genomic RNA
tgcaagtcctgaggttgaaga

SEQ ID NO: 2691 - RNA, 22 nt, Homo sapiens
  source 1..22: mol_type = genomic RNA
tgtgatatcatggttcctggga

SEQ ID NO: 2692 - RNA, 22 nt, Homo sapiens
  source 1..22: mol_type = genomic RNA
tcccaggaaccatgatatcaca

SEQ ID NO: 2693 - RNA, 22 nt, Homo sapiens
  source 1..22: mol_type = genomic RNA
ctgggaggtgtgatattgtggt

SEQ ID NO: 2694 - RNA, 22 nt, Homo sapiens
  source 1..22: mol_type = genomic RNA
accacaatatcacacctcccag

SEQ ID NO: 2695 - RNA, 22 nt, Homo sapiens
  source 1..22: mol_type = genomic RNA
caggtagatatttgataggcat

SEQ ID NO: 2696 - RNA, 22 nt, Homo sapiens
  source 1..22: mol_type = genomic RNA
atgcctatcaaatatctacctg

SEQ ID NO: 2697 - RNA, 21 nt, Homo sapiens
  source 1..21: mol_type = genomic RNA
gcctatcacatatctgcctgt

SEQ ID NO: 2698 - RNA, 21 nt, Homo sapiens
  source 1..21: mol_type = genomic RNA
acaggcagatatgtgataggc

SEQ ID NO: 2699 - RNA, 20 nt, Homo sapiens
  source 1..20: mol_type = genomic RNA
gggctggggcgcggggaggt

SEQ ID NO: 2700 - RNA, 20 nt, Homo sapiens
  source 1..20: mol_type = genomic RNA
acctccccgcgccccagccc

SEQ ID NO: 2701 - RNA, 18 nt, Homo sapiens
  source 1..18: mol_type = genomic RNA
tgcttcctttcagagggt

SEQ ID NO: 2702 - RNA, 18 nt, Homo sapiens
  source 1..18: mol_type = genomic RNA
accctctgaaaggaagca

SEQ ID NO: 2703 - RNA, 21 nt, Homo sapiens
  source 1..21: mol_type = genomic RNA
tgagttggccatctgagtgag

SEQ ID NO: 2704 - RNA, 21 nt, Homo sapiens
  source 1..21: mol_type = genomic RNA
ctcactcagatggccaactca

SEQ ID NO: 2705 - RNA, 23 nt, Homo sapiens
  source 1..23: mol_type = genomic RNA
aacattcattgttgtcggtgggt

SEQ ID NO: 2706 - RNA, 23 nt, Homo sapiens
  source 1..23: mol_type = genomic RNA
acccaccgacaacaatgaatgtt

SEQ ID NO: 2707 - RNA, 21 nt, Homo sapiens
  source 1..21: mol_type = genomic RNA
tcacagtgaaccggtctcttt

SEQ ID NO: 2708 - RNA, 21 nt, Homo sapiens
  source 1..21: mol_type = genomic RNA
aaagagaccggttcactgtga

SEQ ID NO: 2709 - RNA, 22 nt, Homo sapiens
  source 1..22: mol_type = genomic RNA
caacaaatcacagtctgccata

SEQ ID NO: 2710 - RNA, 22 nt, Homo sapiens
  source 1..22: mol_type = genomic RNA
tatggcagactgtgatttgttg

SEQ ID NO: 2711 - RNA, 21 nt, Homo sapiens
  source 1..21: mol_type = genomic RNA
ctcactgaacaatgaatgcaa

SEQ ID NO: 2712 - RNA, 21 nt, Homo sapiens
  source 1..21: mol_type = genomic RNA
ttgcattcattgttcagtgag

SEQ ID NO: 2713 - RNA, 23 nt, Homo sapiens
  source 1..23: mol_type = genomic RNA
aacattcattgctgtcggtgggt

SEQ ID NO: 2714 - RNA, 23 nt, Homo sapiens
  source 1..23: mol_type = genomic RNA
acccaccgacagcaatgaatgtt

SEQ ID NO: 2715 - RNA, 22 nt, Homo sapiens
  source 1..22: mol_type = genomic RNA
accatcgaccgttgattgtacc

SEQ ID NO: 2716 - RNA, 22 nt, Homo sapiens
  source 1..22: mol_type = genomic RNA
ggtacaatcaacggtcgatggt

SEQ ID NO: 2717 - RNA, 23 nt, Homo sapiens
  source 1..23: mol_type = genomic RNA
aacattcaacgctgtcggtgagt

SEQ ID NO: 2718 - RNA, 23 nt, Homo sapiens
  source 1..23: mol_type = genomic RNA
actcaccgacagcgttgaatgtt

SEQ ID NO: 2719 - RNA, 22 nt, Homo sapiens
  source 1..22: mol_type = genomic RNA
accactgaccgttgactgtacc

SEQ ID NO: 2720 - RNA, 22 nt, Homo sapiens
  source 1..22: mol_type = genomic RNA
ggtacagtcaacggtcagtggt

SEQ ID NO: 2721 - RNA, 22 nt, Homo sapiens
  source 1..22: mol_type = genomic RNA
ctgttgccactaacctcaacct

SEQ ID NO: 2722 - RNA, 22 nt, Homo sapiens
  source 1..22: mol_type = genomic RNA
aggttgaggttagtggcaacag

SEQ ID NO: 2723 - RNA, 22 nt, Homo sapiens
  source 1..22: mol_type = genomic RNA
ataagacgagcaaaaagcttgt

SEQ ID NO: 2724 - RNA, 22 nt, Homo sapiens
  source 1..22: mol_type = genomic RNA
acaagctttttgctcgtcttat

SEQ ID NO: 2725 - RNA, 22 nt, Homo sapiens
  source 1..22: mol_type = genomic RNA
ataagacgaacaaaaggtttgt

SEQ ID NO: 2726 - RNA, 22 nt, Homo sapiens
  source 1..22: mol_type = genomic RNA
acaaaccttttgttcgtcttat

SEQ ID NO: 2727 - RNA, 21 nt, Homo sapiens
  source 1..21: mol_type = genomic RNA
agggagggacgggggctgtgc

SEQ ID NO: 2728 - RNA, 21 nt, Homo sapiens
  source 1..21: mol_type = genomic RNA
gcacagcccccgtccctccct

SEQ ID NO: 2729 - RNA, 23 nt, Homo sapiens
  source 1..23: mol_type = genomic RNA
tctggctccgtgtcttcactccc

SEQ ID NO: 2730 - RNA, 23 nt, Homo sapiens
  source 1..23: mol_type = genomic RNA
gggagtgaagacacggagccaga

SEQ ID NO: 2731 - RNA, 22 nt, Homo sapiens
  source 1..22: mol_type = genomic RNA
tggaatgtaaagaagtatgtat

SEQ ID NO: 2732 - RNA, 22 nt, Homo sapiens
  source 1..22: mol_type = genomic RNA
atacatacttctttacattcca

SEQ ID NO: 2733 - RNA, 22 nt, Homo sapiens
  source 1..22: mol_type = genomic RNA
aacatcacagcaagtctgtgct

SEQ ID NO: 2734 - RNA, 22 nt, Homo sapiens
  source 1..22: mol_type = genomic RNA
agcacagacttgctgtgatgtt

SEQ ID NO: 2735 - RNA, 21 nt, Homo sapiens
  source 1..21: mol_type = genomic RNA
ttaagacttgcagtgatgttt

SEQ ID NO: 2736 - RNA, 21 nt, Homo sapiens
  source 1..21: mol_type = genomic RNA
aaacatcactgcaagtcttaa

SEQ ID NO: 2737 - RNA, 22 nt, Homo sapiens
  source 1..22: mol_type = genomic RNA
aacatcactgcaagtcttaaca

SEQ ID NO: 2738 - RNA, 22 nt, Homo sapiens
  source 1..22: mol_type = genomic RNA
tgttaagacttgcagtgatgtt

SEQ ID NO: 2739 - RNA, 21 nt, Homo sapiens
  source 1..21: mol_type = genomic RNA
acagacttgctgtgatgttca

SEQ ID NO: 2740 - RNA, 21 nt, Homo sapiens
  source 1..21: mol_type = genomic RNA
tgaacatcacagcaagtctgt

SEQ ID NO: 2741 - RNA, 22 nt, Homo sapiens
  source 1..22: mol_type = genomic RNA
aaaccgttaccattactgagtt

SEQ ID NO: 2742 - RNA, 22 nt, Homo sapiens
  source 1..22: mol_type = genomic RNA
aactcagtaatggtaacggttt

SEQ ID NO: 2743 - RNA, 22 nt, Homo sapiens
  source 1..22: mol_type = genomic RNA
tagcaagagaaccattaccatt

SEQ ID NO: 2744 - RNA, 22 nt, Homo sapiens
  source 1..22: mol_type = genomic RNA
aatggtaatggttctcttgcta

SEQ ID NO: 2745 - RNA, 23 nt, Homo sapiens
  source 1..23: mol_type = genomic RNA
tgaggggcagagagcgagacttt

SEQ ID NO: 2746 - RNA, 23 nt, Homo sapiens
  source 1..23: mol_type = genomic RNA
aaagtctcgctctctgcccctca

SEQ ID NO: 2747 - RNA, 22 nt, Homo sapiens
  source 1..22: mol_type = genomic RNA
caagctcgcttctatgggtctg

SEQ ID NO: 2748 - RNA, 22 nt, Homo sapiens
  source 1..22: mol_type = genomic RNA
cagacccatagaagcgagcttg

SEQ ID NO: 2749 - RNA, 22 nt, Homo sapiens
  source 1..22: mol_type = genomic RNA
aacccgtagatccgatcttgtg

SEQ ID NO: 2750 - RNA, 22 nt, Homo sapiens
  source 1..22: mol_type = genomic RNA
cacaagatcggatctacgggtt

SEQ ID NO: 2751 - RNA, 22 nt, Homo sapiens
  source 1..22: mol_type = genomic RNA
caagctcgtgtctgtgggtccg

SEQ ID NO: 2752 - RNA, 22 nt, Homo sapiens
  source 1..22: mol_type = genomic RNA
cggacccacagacacgagcttg

SEQ ID NO: 2753 - RNA, 22 nt, Homo sapiens
  source 1..22: mol_type = genomic RNA
cacccgtagaaccgaccttgcg

SEQ ID NO: 2754 - RNA, 22 nt, Homo sapiens
  source 1..22: mol_type = genomic RNA
cgcaaggtcggttctacgggtg

SEQ ID NO: 2755 - RNA, 23 nt, Homo sapiens
  source 1..23: mol_type = genomic RNA
tggagacgcggccctgttggagt

SEQ ID NO: 2756 - RNA, 23 nt, Homo sapiens
  source 1..23: mol_type = genomic RNA
actccaacagggccgcgtctcca

SEQ ID NO: 2757 - RNA, 23 nt, Homo sapiens
  source 1..23: mol_type = genomic RNA
tctacagtgcacgtgtctccagt

SEQ ID NO: 2758 - RNA, 23 nt, Homo sapiens
  source 1..23: mol_type = genomic RNA
actggagacacgtgcactgtaga

SEQ ID NO: 2759 - RNA, 22 nt, Homo sapiens
  source 1..22: mol_type = genomic RNA
caaattcgtatctaggggaata

SEQ ID NO: 2760 - RNA, 22 nt, Homo sapiens
  source 1..22: mol_type = genomic RNA
tattcccctagatacgaatttg

SEQ ID NO: 2761 - RNA, 23 nt, Homo sapiens
  source 1..23: mol_type = genomic RNA
taccctgtagatccgaatttgtg

SEQ ID NO: 2762 - RNA, 23 nt, Homo sapiens
  source 1..23: mol_type = genomic RNA
cacaaattcggatctacagggta

SEQ ID NO: 2763 - RNA, 23 nt, Homo sapiens
  source 1..23: mol_type = genomic RNA
cctgcagcgacttgatggcttcc

SEQ ID NO: 2764 - RNA, 23 nt, Homo sapiens
  source 1..23: mol_type = genomic RNA
ggaagccatcaagtcgctgcagg

SEQ ID NO: 2765 - RNA, 22 nt, Homo sapiens
  source 1..22: mol_type = genomic RNA
tcagtgcactacagaactttgt

SEQ ID NO: 2766 - RNA, 22 nt, Homo sapiens
  source 1..22: mol_type = genomic RNA
acaaagttctgtagtgcactga

SEQ ID NO: 2767 - RNA, 22 nt, Homo sapiens
  source 1..22: mol_type = genomic RNA
aaagttctgagacactccgact

SEQ ID NO: 2768 - RNA, 22 nt, Homo sapiens
  source 1..22: mol_type = genomic RNA
agtcggagtgtctcagaacttt

SEQ ID NO: 2769 - RNA, 22 nt, Homo sapiens
  source 1..22: mol_type = genomic RNA
cctgttctccattacttggctc

SEQ ID NO: 2770 - RNA, 22 nt, Homo sapiens
  source 1..22: mol_type = genomic RNA
gagccaagtaatggagaacagg

SEQ ID NO: 2771 - RNA, 21 nt, Homo sapiens
  source 1..21: mol_type = genomic RNA
ttcaagtaattcaggataggt

SEQ ID NO: 2772 - RNA, 21 nt, Homo sapiens
  source 1..21: mol_type = genomic RNA
acctatcctgaattacttgaa

SEQ ID NO: 2773 - RNA, 22 nt, Homo sapiens
  source 1..22: mol_type = genomic RNA
gccctgaacgaggggtctggag

SEQ ID NO: 2774 - RNA, 22 nt, Homo sapiens
  source 1..22: mol_type = genomic RNA
ctccagacccctcgttcagggc

SEQ ID NO: 2775 - RNA, 22 nt, Homo sapiens
  source 1..22: mol_type = genomic RNA
gctgactcctagtccagggctc

SEQ ID NO: 2776 - RNA, 22 nt, Homo sapiens
  source 1..22: mol_type = genomic RNA
gagccctggactaggagtcagc

SEQ ID NO: 2777 - RNA, 22 nt, Homo sapiens
  source 1..22: mol_type = genomic RNA
atcacacaaaggcaacttttgt

SEQ ID NO: 2778 - RNA, 22 nt, Homo sapiens
  source 1..22: mol_type = genomic RNA
acaaaagttgcctttgtgtgat

SEQ ID NO: 2779 - RNA, 22 nt, Homo sapiens
  source 1..22: mol_type = genomic RNA
agaggttgcccttggtgaattc

SEQ ID NO: 2780 - RNA, 22 nt, Homo sapiens
  source 1..22: mol_type = genomic RNA
gaattcaccaagggcaacctct

SEQ ID NO: 2781 - RNA, 21 nt, Homo sapiens
  source 1..21: mol_type = genomic RNA
ggtagattttccttctatggt

SEQ ID NO: 2782 - RNA, 21 nt, Homo sapiens
  source 1..21: mol_type = genomic RNA
accatagaaggaaaatctacc

SEQ ID NO: 2783 - RNA, 21 nt, Homo sapiens
  source 1..21: mol_type = genomic RNA
atcatagaggaaaatccacgt

SEQ ID NO: 2784 - RNA, 21 nt, Homo sapiens
  source 1..21: mol_type = genomic RNA
acgtggattttcctctatgat

SEQ ID NO: 2785 - RNA, 22 nt, Homo sapiens
  source 1..22: mol_type = genomic RNA
gtagattctccttctatgagta

SEQ ID NO: 2786 - RNA, 22 nt, Homo sapiens
  source 1..22: mol_type = genomic RNA
tactcatagaaggagaatctac

SEQ ID NO: 2787 - RNA, 22 nt, Homo sapiens
  source 1..22: mol_type = genomic RNA
ctggtacaggcctgggggacag

SEQ ID NO: 2788 - RNA, 22 nt, Homo sapiens
  source 1..22: mol_type = genomic RNA
ctgtcccccaggcctgtaccag

SEQ ID NO: 2789 - RNA, 22 nt, Homo sapiens
  source 1..22: mol_type = genomic RNA
tctcccaacccttgtaccagtg

SEQ ID NO: 2790 - RNA, 22 nt, Homo sapiens
  source 1..22: mol_type = genomic RNA
cactggtacaagggttgggaga

SEQ ID NO: 2791 - RNA, 22 nt, Homo sapiens
  source 1..22: mol_type = genomic RNA
acgggttaggctcttgggagct

SEQ ID NO: 2792 - RNA, 22 nt, Homo sapiens
  source 1..22: mol_type = genomic RNA
agctcccaagagcctaacccgt

SEQ ID NO: 2793 - RNA, 22 nt, Homo sapiens
  source 1..22: mol_type = genomic RNA
tcacaagtcaggctcttgggac

SEQ ID NO: 2794 - RNA, 22 nt, Homo sapiens
  source 1..22: mol_type = genomic RNA
gtcccaagagcctgacttgtga

SEQ ID NO: 2795 - RNA, 22 nt, Homo sapiens
  source 1..22: mol_type = genomic RNA
aacccgtagatccgaacttgtg

SEQ ID NO: 2796 - RNA, 22 nt, Homo sapiens
  source 1..22: mol_type = genomic RNA
cacaagttcggatctacgggtt

SEQ ID NO: 2797 - RNA, 21 nt, Homo sapiens
  source 1..21: mol_type = genomic RNA
ctgtacaggccactgccttgc

SEQ ID NO: 2798 - RNA, 21 nt, Homo sapiens
  source 1..21: mol_type = genomic RNA
gcaaggcagtggcctgtacag

SEQ ID NO: 2799 - RNA, 22 nt, Homo sapiens
  source 1..22: mol_type = genomic RNA
tgaggtagtagtttgtacagtt

SEQ ID NO: 2800 - RNA, 22 nt, Homo sapiens
  source 1..22: mol_type = genomic RNA
aactgtacaaactactacctca

SEQ ID NO: 2801 - RNA, 22 nt, Homo sapiens
  source 1..22: mol_type = genomic RNA
tccctgagaccctaacttgtga

SEQ ID NO: 2802 - RNA, 22 nt, Homo sapiens
  source 1..22: mol_type = genomic RNA
tcacaagttagggtctcaggga

SEQ ID NO: 2803 - RNA, 22 nt, Homo sapiens
  source 1..22: mol_type = genomic RNA
caagcttgtatctataggtatg

SEQ ID NO: 2804 - RNA, 22 nt, Homo sapiens
  source 1..22: mol_type = genomic RNA
catacctatagatacaagcttg

SEQ ID NO: 2805 - RNA, 23 nt, Homo sapiens
  source 1..23: mol_type = genomic RNA
aaagtgctgcgacatttgagcgt

SEQ ID NO: 2806 - RNA, 23 nt, Homo sapiens
  source 1..23: mol_type = genomic RNA
acgctcaaatgtcgcagcacttt

SEQ ID NO: 2807 - RNA, 22 nt, Homo sapiens
  source 1..22: mol_type = genomic RNA
tttagagacggggtcttgctct

SEQ ID NO: 2808 - RNA, 22 nt, Homo sapiens
  source 1..22: mol_type = genomic RNA
agagcaagaccccgtctctaaa

SEQ ID NO: 2809 - RNA, 24 nt, Homo sapiens
  source 1..24: mol_type = genomic RNA
tggccctgactgaagaccagcagt

SEQ ID NO: 2810 - RNA, 24 nt, Homo sapiens
  source 1..24: mol_type = genomic RNA
actgctggtcttcagtcagggcca

SEQ ID NO: 2811 - RNA, 21 nt, Homo sapiens
  source 1..21: mol_type = genomic RNA
gcgacccatacttggtttcag

SEQ ID NO: 2812 - RNA, 21 nt, Homo sapiens
  source 1..21: mol_type = genomic RNA
ctgaaaccaagtatgggtcgc

SEQ ID NO: 2813 - RNA, 22 nt, Homo sapiens
  source 1..22: mol_type = genomic RNA
gaaatcaagcgtgggtgagacc

SEQ ID NO: 2814 - RNA, 22 nt, Homo sapiens
  source 1..22: mol_type = genomic RNA
ggtctcacccacgcttgatttc

SEQ ID NO: 2815 - RNA, 21 nt, Homo sapiens
  source 1..21: mol_type = genomic RNA
ccctgggcctctgctccccag

SEQ ID NO: 2816 - RNA, 21 nt, Homo sapiens
  source 1..21: mol_type = genomic RNA
ctggggagcagaggcccaggg

SEQ ID NO: 2817 - RNA, 24 nt, Homo sapiens
  source 1..24: mol_type = genomic RNA
tggggagctgaggctctgggggtg

SEQ ID NO: 2818 - RNA, 24 nt, Homo sapiens
  source 1..24: mol_type = genomic RNA
cacccccagagcctcagctcccca

SEQ ID NO: 2819 - RNA, 20 nt, Homo sapiens
  source 1..20: mol_type = genomic RNA
ggggagctgtggaagcagta

SEQ ID NO: 2820 - RNA, 20 nt, Homo sapiens
  source 1..20: mol_type = genomic RNA
tactgcttccacagctcccc

SEQ ID NO: 2821 - RNA, 25 nt, Homo sapiens
  source 1..25: mol_type = genomic RNA
ctagtgagggacagaaccaggattc

SEQ ID NO: 2822 - RNA, 25 nt, Homo sapiens
  source 1..25: mol_type = genomic RNA
gaatcctggttctgtccctcactag

SEQ ID NO: 2823 - RNA, 20 nt, Homo sapiens
  source 1..20: mol_type = genomic RNA
agagtcttgtgatgtcttgc

SEQ ID NO: 2824 - RNA, 20 nt, Homo sapiens
  source 1..20: mol_type = genomic RNA
gcaagacatcacaagactct

SEQ ID NO: 2825 - RNA, 23 nt, Homo sapiens
  source 1..23: mol_type = genomic RNA
gcagcagagaataggactacgtc

SEQ ID NO: 2826 - RNA, 23 nt, Homo sapiens
  source 1..23: mol_type = genomic RNA
gacgtagtcctattctctgctgc

SEQ ID NO: 2827 - RNA, 23 nt, Homo sapiens
  source 1..23: mol_type = genomic RNA
tgagcgcctcgacgacagagccg

SEQ ID NO: 2828 - RNA, 23 nt, Homo sapiens
  source 1..23: mol_type = genomic RNA
cggctctgtcgtcgaggcgctca

SEQ ID NO: 2829 - RNA, 23 nt, Homo sapiens
  source 1..23: mol_type = genomic RNA
tccctgtcctccaggagctcacg

SEQ ID NO: 2830 - RNA, 23 nt, Homo sapiens
  source 1..23: mol_type = genomic RNA
cgtgagctcctggaggacaggga

SEQ ID NO: 2831 - RNA, 22 nt, Homo sapiens
  source 1..22: mol_type = genomic RNA
ctatacggcctcctagctttcc

SEQ ID NO: 2832 - RNA, 22 nt, Homo sapiens
  source 1..22: mol_type = genomic RNA
ggaaagctaggaggccgtatag

SEQ ID NO: 2833 - RNA, 22 nt, Homo sapiens
  source 1..22: mol_type = genomic RNA
tgaggtaggaggttgtatagtt

SEQ ID NO: 2834 - RNA, 22 nt, Homo sapiens
  source 1..22: mol_type = genomic RNA
aactatacaacctcctacctca

SEQ ID NO: 2835 - RNA, 22 nt, Homo sapiens
  source 1..22: mol_type = genomic RNA
ctgcgcaagctactgccttgct

SEQ ID NO: 2836 - RNA, 22 nt, Homo sapiens
  source 1..22: mol_type = genomic RNA
agcaaggcagtagcttgcgcag

SEQ ID NO: 2837 - RNA, 22 nt, Homo sapiens
  source 1..22: mol_type = genomic RNA
tgaggtagtagtttgtgctgtt

SEQ ID NO: 2838 - RNA, 22 nt, Homo sapiens
  source 1..22: mol_type = genomic RNA
aacagcacaaactactacctca

SEQ ID NO: 2839 - RNA, 22 nt, Homo sapiens
  source 1..22: mol_type = genomic RNA
tgccctgtggactcagttctgg

SEQ ID NO: 2840 - RNA, 22 nt, Homo sapiens
  source 1..22: mol_type = genomic RNA
ccagaactgagtccacagggca

SEQ ID NO: 2841 - RNA, 21 nt, Homo sapiens
  source 1..21: mol_type = genomic RNA
tggttctagacttgccaacta

SEQ ID NO: 2842 - RNA, 21 nt, Homo sapiens
  source 1..21: mol_type = genomic RNA
tagttggcaagtctagaacca

SEQ ID NO: 2843 - RNA, 23 nt, Homo sapiens
  source 1..23: mol_type = genomic RNA
tgtctgcccgcatgcctgcctct

SEQ ID NO: 2844 - RNA, 23 nt, Homo sapiens
  source 1..23: mol_type = genomic RNA
agaggcaggcatgcgggcagaca

SEQ ID NO: 2845 - RNA, 22 nt, Homo sapiens
  source 1..22: mol_type = genomic RNA
aaaagtaattgcggtctttggt

SEQ ID NO: 2846 - RNA, 22 nt, Homo sapiens
  source 1..22: mol_type = genomic RNA
accaaagaccgcaattactttt

SEQ ID NO: 2847 - RNA, 18 nt, Homo sapiens
  source 1..18: mol_type = genomic RNA
tcgaggagctcacagtct

SEQ ID NO: 2848 - RNA, 18 nt, Homo sapiens
  source 1..18: mol_type = genomic RNA
agactgtgagctcctcga

SEQ ID NO: 2849 - RNA, 22 nt, Homo sapiens
  source 1..22: mol_type = genomic RNA
ctatacaatctattgccttccc

SEQ ID NO: 2850 - RNA, 22 nt, Homo sapiens
  source 1..22: mol_type = genomic RNA
gggaaggcaatagattgtatag

SEQ ID NO: 2851 - RNA, 22 nt, Homo sapiens
  source 1..22: mol_type = genomic RNA
ctatacagtctactgtctttcc

SEQ ID NO: 2852 - RNA, 22 nt, Homo sapiens
  source 1..22: mol_type = genomic RNA
ggaaagacagtagactgtatag

SEQ ID NO: 2853 - RNA, 22 nt, Homo sapiens
  source 1..22: mol_type = genomic RNA
tgaggtagtagattgtatagtt

SEQ ID NO: 2854 - RNA, 22 nt, Homo sapiens
  source 1..22: mol_type = genomic RNA
aactatacaatctactacctca

SEQ ID NO: 2855 - RNA, 22 nt, Homo sapiens
  source 1..22: mol_type = genomic RNA
aaaagtaattgtggttttggcc

SEQ ID NO: 2856 - RNA, 22 nt, Homo sapiens
  source 1..22: mol_type = genomic RNA
ggccaaaaccacaattactttt

SEQ ID NO: 2857 - RNA, 22 nt, Homo sapiens
  source 1..22: mol_type = genomic RNA
aaaagtaattgcggtttttgcc

SEQ ID NO: 2858 - RNA, 22 nt, Homo sapiens
  source 1..22: mol_type = genomic RNA
ggcaaaaaccgcaattactttt

SEQ ID NO: 2859 - RNA, 22 nt, Homo sapiens
  source 1..22: mol_type = genomic RNA
cctctgaaattcagttcttcag

SEQ ID NO: 2860 - RNA, 22 nt, Homo sapiens
  source 1..22: mol_type = genomic RNA
ctgaagaactgaatttcagagg

SEQ ID NO: 2861 - RNA, 22 nt, Homo sapiens
  source 1..22: mol_type = genomic RNA
tgagaactgaattccatgggtt

SEQ ID NO: 2862 - RNA, 22 nt, Homo sapiens
  source 1..22: mol_type = genomic RNA
aacccatggaattcagttctca

SEQ ID NO: 2863 - RNA, 22 nt, Homo sapiens
  source 1..22: mol_type = genomic RNA
acagcaggcacagacaggcagt

SEQ ID NO: 2864 - RNA, 22 nt, Homo sapiens
  source 1..22: mol_type = genomic RNA
actgcctgtctgtgcctgctgt

SEQ ID NO: 2865 - RNA, 22 nt, Homo sapiens
  source 1..22: mol_type = genomic RNA
tgcctgtctacacttgctgtgc

SEQ ID NO: 2866 - RNA, 22 nt, Homo sapiens
  source 1..22: mol_type = genomic RNA
gcacagcaagtgtagacaggca

SEQ ID NO: 2867 - RNA, 22 nt, Homo sapiens
  source 1..22: mol_type = genomic RNA
tagcaccatctgaaatcggtta

SEQ ID NO: 2868 - RNA, 22 nt, Homo sapiens
  source 1..22: mol_type = genomic RNA
taaccgatttcagatggtgcta

SEQ ID NO: 2869 - RNA, 22 nt, Homo sapiens
  source 1..22: mol_type = genomic RNA
actgatttcttttggtgttcag

SEQ ID NO: 2870 - RNA, 22 nt, Homo sapiens
  source 1..22: mol_type = genomic RNA
ctgaacaccaaaagaaatcagt

SEQ ID NO: 2871 - RNA, 24 nt, Homo sapiens
  source 1..24: mol_type = genomic RNA
gctggtttcatatggtggtttaga

SEQ ID NO: 2872 - RNA, 24 nt, Homo sapiens
  source 1..24: mol_type = genomic RNA
tctaaaccaccatatgaaaccagc

SEQ ID NO: 2873 - RNA, 22 nt, Homo sapiens
  source 1..22: mol_type = genomic RNA
ctggtttcacatggtggcttag

SEQ ID NO: 2874 - RNA, 22 nt, Homo sapiens
  source 1..22: mol_type = genomic RNA
ctaagccaccatgtgaaaccag

SEQ ID NO: 2875 - RNA, 23 nt, Homo sapiens
  source 1..23: mol_type = genomic RNA
tagcaccatttgaaatcagtgtt

SEQ ID NO: 2876 - RNA, 23 nt, Homo sapiens
  source 1..23: mol_type = genomic RNA
aacactgatttcaaatggtgcta

SEQ ID NO: 2877 - RNA, 22 nt, Homo sapiens
  source 1..22: mol_type = genomic RNA
tagcaccatttgaaatcggtta

SEQ ID NO: 2878 - RNA, 22 nt, Homo sapiens
  source 1..22: mol_type = genomic RNA
taaccgatttcaaatggtgcta

SEQ ID NO: 2879 - RNA, 22 nt, Homo sapiens
  source 1..22: mol_type = genomic RNA
tgaccgatttctcctggtgttc

SEQ ID NO: 2880 - RNA, 22 nt, Homo sapiens
  source 1..22: mol_type = genomic RNA
gaacaccaggagaaatcggtca

SEQ ID NO: 2881 - RNA, 23 nt, Homo sapiens
  source 1..23: mol_type = genomic RNA
tgtcactcggctcggcccactac

SEQ ID NO: 2882 - RNA, 23 nt, Homo sapiens
  source 1..23: mol_type = genomic RNA
gtagtgggccgagccgagtgaca

SEQ ID NO: 2883 - RNA, 22 nt, Homo sapiens
  source 1..22: mol_type = genomic RNA
ctgccaattccataggtcacag

SEQ ID NO: 2884 - RNA, 22 nt, Homo sapiens
  source 1..22: mol_type = genomic RNA
ctgtgacctatggaattggcag

SEQ ID NO: 2885 - RNA, 21 nt, Homo sapiens
  source 1..21: mol_type = genomic RNA
ctgacctatgaattgacagcc

SEQ ID NO: 2886 - RNA, 21 nt, Homo sapiens
  source 1..21: mol_type = genomic RNA
ggctgtcaattcataggtcag

SEQ ID NO: 2887 - RNA, 20 nt, Homo sapiens
  source 1..20: mol_type = genomic RNA
actgccccaggtgctgctgg

SEQ ID NO: 2888 - RNA, 20 nt, Homo sapiens
  source 1..20: mol_type = genomic RNA
ccagcagcacctggggcagt

SEQ ID NO: 2889 - RNA, 22 nt, Homo sapiens
  source 1..22: mol_type = genomic RNA
aacgccattatcacactaaata

SEQ ID NO: 2890 - RNA, 22 nt, Homo sapiens
  source 1..22: mol_type = genomic RNA
tatttagtgtgataatggcgtt

SEQ ID NO: 2891 - RNA, 22 nt, Homo sapiens
  source 1..22: mol_type = genomic RNA
ctttcagtcggatgtttgcagc

SEQ ID NO: 2892 - RNA, 22 nt, Homo sapiens
  source 1..22: mol_type = genomic RNA
gctgcaaacatccgactgaaag

SEQ ID NO: 2893 - RNA, 22 nt, Homo sapiens
  source 1..22: mol_type = genomic RNA
aattgcacggtatccatctgta

SEQ ID NO: 2894 - RNA, 22 nt, Homo sapiens
  source 1..22: mol_type = genomic RNA
tacagatggataccgtgcaatt

SEQ ID NO: 2895 - RNA, 22 nt, Homo sapiens
  source 1..22: mol_type = genomic RNA
cgggtggatcacgatgcaattt

SEQ ID NO: 2896 - RNA, 22 nt, Homo sapiens
  source 1..22: mol_type = genomic RNA
aaattgcatcgtgatccacccg

SEQ ID NO: 2897 - RNA, 22 nt, Homo sapiens
  source 1..22: mol_type = genomic RNA
ctgggaggtggatgtttacttc

SEQ ID NO: 2898 - RNA, 22 nt, Homo sapiens
  source 1..22: mol_type = genomic RNA
gaagtaaacatccacctcccag

SEQ ID NO: 2899 - RNA, 22 nt, Homo sapiens
  source 1..22: mol_type = genomic RNA
tgtaaacatcctacactcagct

SEQ ID NO: 2900 - RNA, 22 nt, Homo sapiens
  source 1..22: mol_type = genomic RNA
agctgagtgtaggatgtttaca

SEQ ID NO: 2901 - RNA, 22 nt, Homo sapiens
  source 1..22: mol_type = genomic RNA
ctgggagagggttgtttactcc

SEQ ID NO: 2902 - RNA, 22 nt, Homo sapiens
  source 1..22: mol_type = genomic RNA
ggagtaaacaaccctctcccag

SEQ ID NO: 2903 - RNA, 22 nt, Homo sapiens
  source 1..22: mol_type = genomic RNA
ctgggagaaggctgtttactct

SEQ ID NO: 2904 - RNA, 22 nt, Homo sapiens
  source 1..22: mol_type = genomic RNA
agagtaaacagccttctcccag

SEQ ID NO: 2905 - RNA, 23 nt, Homo sapiens
  source 1..23: mol_type = genomic RNA
tgtaaacatcctacactctcagc

SEQ ID NO: 2906 - RNA, 23 nt, Homo sapiens
  source 1..23: mol_type = genomic RNA
gctgagagtgtaggatgtttaca

SEQ ID NO: 2907 - RNA, 22 nt, Homo sapiens
  source 1..22: mol_type = genomic RNA
tttttcattattgctcctgacc

SEQ ID NO: 2908 - RNA, 22 nt, Homo sapiens
  source 1..22: mol_type = genomic RNA
ggtcaggagcaataatgaaaaa

SEQ ID NO: 2909 - RNA, 23 nt, Homo sapiens
  source 1..23: mol_type = genomic RNA
tcaagagcaataacgaaaaatgt

SEQ ID NO: 2910 - RNA, 23 nt, Homo sapiens
  source 1..23: mol_type = genomic RNA
acatttttcgttattgctcttga

SEQ ID NO: 2911 - RNA, 23 nt, Homo sapiens
  source 1..23: mol_type = genomic RNA
caaagtgcttacagtgcaggtag

SEQ ID NO: 2912 - RNA, 23 nt, Homo sapiens
  source 1..23: mol_type = genomic RNA
ctacctgcactgtaagcactttg

SEQ ID NO: 2913 - RNA, 22 nt, Homo sapiens
  source 1..22: mol_type = genomic RNA
ggattcctggaaatactgttct

SEQ ID NO: 2914 - RNA, 22 nt, Homo sapiens
  source 1..22: mol_type = genomic RNA
agaacagtatttccaggaatcc

SEQ ID NO: 2915 - RNA, 23 nt, Homo sapiens
  source 1..23: mol_type = genomic RNA
gtccagttttcccaggaatccct

SEQ ID NO: 2916 - RNA, 23 nt, Homo sapiens
  source 1..23: mol_type = genomic RNA
agggattcctgggaaaactggac

SEQ ID NO: 2917 - RNA, 22 nt, Homo sapiens
  source 1..22: mol_type = genomic RNA
actgcattatgagcacttaaag

SEQ ID NO: 2918 - RNA, 22 nt, Homo sapiens
  source 1..22: mol_type = genomic RNA
ctttaagtgctcataatgcagt

SEQ ID NO: 2919 - RNA, 23 nt, Homo sapiens
  source 1..23: mol_type = genomic RNA
taaagtgcttatagtgcaggtag

SEQ ID NO: 2920 - RNA, 23 nt, Homo sapiens
  source 1..23: mol_type = genomic RNA
ctacctgcactataagcacttta

SEQ ID NO: 2921 - RNA, 22 nt, Homo sapiens
  source 1..22: mol_type = genomic RNA
gagggttgggtggaggctctcc

SEQ ID NO: 2922 - RNA, 22 nt, Homo sapiens
  source 1..22: mol_type = genomic RNA
ggagagcctccacccaaccctc

SEQ ID NO: 2923 - RNA, 22 nt, Homo sapiens
  source 1..22: mol_type = genomic RNA
ctgtgcgtgtgacagcggctga

SEQ ID NO: 2924 - RNA, 22 nt, Homo sapiens
  source 1..22: mol_type = genomic RNA
tcagccgctgtcacacgcacag

SEQ ID NO: 2925 - RNA, 22 nt, Homo sapiens
  source 1..22: mol_type = genomic RNA
ccagtggggctgctgttatctg

SEQ ID NO: 2926 - RNA, 22 nt, Homo sapiens
  source 1..22: mol_type = genomic RNA
cagataacagcagccccactgg

SEQ ID NO: 2927 - RNA, 22 nt, Homo sapiens
  source 1..22: mol_type = genomic RNA
tgtaacagcaactccatgtgga

SEQ ID NO: 2928 - RNA, 22 nt, Homo sapiens
  source 1..22: mol_type = genomic RNA
tccacatggagttgctgttaca

SEQ ID NO: 2929 - RNA, 22 nt, Homo sapiens
  source 1..22: mol_type = genomic RNA
tcacagtggtctctgggattat

SEQ ID NO: 2930 - RNA, 22 nt, Homo sapiens
  source 1..22: mol_type = genomic RNA
ataatcccagagaccactgtga

SEQ ID NO: 2931 - RNA, 22 nt, Homo sapiens
  source 1..22: mol_type = genomic RNA
taatctcagctggcaactgtga

SEQ ID NO: 2932 - RNA, 22 nt, Homo sapiens
  source 1..22: mol_type = genomic RNA
tcacagttgccagctgagatta

SEQ ID NO: 2933 - RNA, 22 nt, Homo sapiens
  source 1..22: mol_type = genomic RNA
cagtgcctcggcagtgcagccc

SEQ ID NO: 2934 - RNA, 22 nt, Homo sapiens
  source 1..22: mol_type = genomic RNA
gggctgcactgccgaggcactg

SEQ ID NO: 2935 - RNA, 20 nt, Homo sapiens
  source 1..20: mol_type = genomic RNA
gtgcattgctgttgcattgc

SEQ ID NO: 2936 - RNA, 20 nt, Homo sapiens
  source 1..20: mol_type = genomic RNA
gcaatgcaacagcaatgcac

SEQ ID NO: 2937 - RNA, 19 nt, Homo sapiens
  source 1..19: mol_type = genomic RNA
actggacttggaggcagaa

SEQ ID NO: 2938 - RNA, 19 nt, Homo sapiens
  source 1..19: mol_type = genomic RNA
ttctgcctccaagtccagt

SEQ ID NO: 2939 - RNA, 25 nt, Homo sapiens
  source 1..25: mol_type = genomic RNA
actggacttggagtcagaagagtgg

SEQ ID NO: 2940 - RNA, 25 nt, Homo sapiens
  source 1..25: mol_type = genomic RNA
ccactcttctgactccaagtccagt

SEQ ID NO: 2941 - RNA, 20 nt, Homo sapiens
  source 1..20: mol_type = genomic RNA
actggacttggagtcagaaa

SEQ ID NO: 2942 - RNA, 20 nt, Homo sapiens
  source 1..20: mol_type = genomic RNA
tttctgactccaagtccagt

SEQ ID NO: 2943 - RNA, 19 nt, Homo sapiens
  source 1..19: mol_type = genomic RNA
actggacttggagtcagga

SEQ ID NO: 2944 - RNA, 19 nt, Homo sapiens
  source 1..19: mol_type = genomic RNA
tcctgactccaagtccagt

SEQ ID NO: 2945 - RNA, 20 nt, Homo sapiens
  source 1..20: mol_type = genomic RNA
actggacttggagccagaag

SEQ ID NO: 2946 - RNA, 20 nt, Homo sapiens
  source 1..20: mol_type = genomic RNA
cttctggctccaagtccagt

SEQ ID NO: 2947 - RNA, 20 nt, Homo sapiens
  source 1..20: mol_type = genomic RNA
actgggcttggagtcagaag

SEQ ID NO: 2948 - RNA, 20 nt, Homo sapiens
  source 1..20: mol_type = genomic RNA
cttctgactccaagcccagt

SEQ ID NO: 2949 - RNA, 21 nt, Homo sapiens
  source 1..21: mol_type = genomic RNA
actggacttggtgtcagatgg

SEQ ID NO: 2950 - RNA, 21 nt, Homo sapiens
  source 1..21: mol_type = genomic RNA
ccatctgacaccaagtccagt

SEQ ID NO: 2951 - RNA, 21 nt, Homo sapiens
  source 1..21: mol_type = genomic RNA
actggactaggagtcagaagg

SEQ ID NO: 2952 - RNA, 21 nt, Homo sapiens
  source 1..21: mol_type = genomic RNA
ccttctgactcctagtccagt

SEQ ID NO: 2953 - RNA, 19 nt, Homo sapiens
  source 1..19: mol_type = genomic RNA
actggatttggagccagaa

SEQ ID NO: 2954 - RNA, 19 nt, Homo sapiens
  source 1..19: mol_type = genomic RNA
ttctggctccaaatccagt

SEQ ID NO: 2955 - RNA, 20 nt, Homo sapiens
  source 1..20: mol_type = genomic RNA
aggaatgttccttctttgcc

SEQ ID NO: 2956 - RNA, 20 nt, Homo sapiens
  source 1..20: mol_type = genomic RNA
ggcaaagaaggaacattcct

SEQ ID NO: 2957 - RNA, 21 nt, Homo sapiens
  source 1..21: mol_type = genomic RNA
tcagtgcatgacagaacttgg

SEQ ID NO: 2958 - RNA, 21 nt, Homo sapiens
  source 1..21: mol_type = genomic RNA
ccaagttctgtcatgcactga

SEQ ID NO: 2959 - RNA, 20 nt, Homo sapiens
  source 1..20: mol_type = genomic RNA
tcacacctgcctcgcccccc

SEQ ID NO: 2960 - RNA, 20 nt, Homo sapiens
  source 1..20: mol_type = genomic RNA
ggggggcgaggcaggtgtga

SEQ ID NO: 2961 - RNA, 21 nt, Homo sapiens
  source 1..21: mol_type = genomic RNA
gtgggcgggggcaggtgtgtg

SEQ ID NO: 2962 - RNA, 21 nt, Homo sapiens
  source 1..21: mol_type = genomic RNA
cacacacctgcccccgcccac

SEQ ID NO: 2963 - RNA, 22 nt, Homo sapiens
  source 1..22: mol_type = genomic RNA
acgcccttcccccccttcttca

SEQ ID NO: 2964 - RNA, 22 nt, Homo sapiens
  source 1..22: mol_type = genomic RNA
tgaagaagggggggaagggcgt

SEQ ID NO: 2965 - RNA, 22 nt, Homo sapiens
  source 1..22: mol_type = genomic RNA
ttgcatatgtaggatgtcccat

SEQ ID NO: 2966 - RNA, 22 nt, Homo sapiens
  source 1..22: mol_type = genomic RNA
atgggacatcctacatatgcaa

SEQ ID NO: 2967 - RNA, 23 nt, Homo sapiens
  source 1..23: mol_type = genomic RNA
gtttgcacgggtgggccttgtct

SEQ ID NO: 2968 - RNA, 23 nt, Homo sapiens
  source 1..23: mol_type = genomic RNA
agacaaggcccacccgtgcaaac

SEQ ID NO: 2969 - RNA, 22 nt, Homo sapiens
  source 1..22: mol_type = genomic RNA
gactatagaactttccccctca

SEQ ID NO: 2970 - RNA, 22 nt, Homo sapiens
  source 1..22: mol_type = genomic RNA
tgagggggaaagttctatagtc

SEQ ID NO: 2971 - RNA, 21 nt, Homo sapiens
  source 1..21: mol_type = genomic RNA
agggggaaagttctatagtcc

SEQ ID NO: 2972 - RNA, 21 nt, Homo sapiens
  source 1..21: mol_type = genomic RNA
ggactatagaactttccccct

SEQ ID NO: 2973 - RNA, 21 nt, Homo sapiens
  source 1..21: mol_type = genomic RNA
ctttttgcggtctgggcttgc

SEQ ID NO: 2974 - RNA, 21 nt, Homo sapiens
  source 1..21: mol_type = genomic RNA
gcaagcccagaccgcaaaaag

SEQ ID NO: 2975 - RNA, 21 nt, Homo sapiens
  source 1..21: mol_type = genomic RNA
tcttgtgttctctagatcagt

SEQ ID NO: 2976 - RNA, 21 nt, Homo sapiens
  source 1..21: mol_type = genomic RNA
actgatctagagaacacaaga

SEQ ID NO: 2977 - RNA, 23 nt, Homo sapiens
  source 1..23: mol_type = genomic RNA
cccagtgttcagactacctgttc

SEQ ID NO: 2978 - RNA, 23 nt, Homo sapiens
  source 1..23: mol_type = genomic RNA
gaacaggtagtctgaacactggg

SEQ ID NO: 2979 - RNA, 22 nt, Homo sapiens
  source 1..22: mol_type = genomic RNA
acagtagtctgcacattggtta

SEQ ID NO: 2980 - RNA, 22 nt, Homo sapiens
  source 1..22: mol_type = genomic RNA
taaccaatgtgcagactactgt

SEQ ID NO: 2981 - RNA, 22 nt, Homo sapiens
  source 1..22: mol_type = genomic RNA
acagtagtctgcacattggtta

SEQ ID NO: 2982 - RNA, 22 nt, Homo sapiens
  source 1..22: mol_type = genomic RNA
taaccaatgtgcagactactgt

SEQ ID NO: 2983 - RNA, 23 nt, Homo sapiens
  source 1..23: mol_type = genomic RNA
cccagtgtttagactatctgttc

SEQ ID NO: 2984 - RNA, 23 nt, Homo sapiens
  source 1..23: mol_type = genomic RNA
gaacagatagtctaaacactggg

SEQ ID NO: 2985 - RNA, 22 nt, Homo sapiens
  source 1..22: mol_type = genomic RNA
tggagtgtgacaatggtgtttg

SEQ ID NO: 2986 - RNA, 22 nt, Homo sapiens
  source 1..22: mol_type = genomic RNA
caaacaccattgtcacactcca

SEQ ID NO: 2987 - RNA, 22 nt, Homo sapiens
  source 1..22: mol_type = genomic RNA
tgccctaaatgccccttctggc

SEQ ID NO: 2988 - RNA, 22 nt, Homo sapiens
  source 1..22: mol_type = genomic RNA
gccagaaggggcatttagggca

SEQ ID NO: 2989 - RNA, 23 nt, Homo sapiens
  source 1..23: mol_type = genomic RNA
taaggtgcatctagtgcagttag

SEQ ID NO: 2990 - RNA, 23 nt, Homo sapiens
  source 1..23: mol_type = genomic RNA
ctaactgcactagatgcacctta

SEQ ID NO: 2991 - RNA, 22 nt, Homo sapiens
  source 1..22: mol_type = genomic RNA
ctcctatatgatgcctttcttc

SEQ ID NO: 2992 - RNA, 22 nt, Homo sapiens
  source 1..22: mol_type = genomic RNA
gaagaaaggcatcatataggag

SEQ ID NO: 2993 - RNA, 21 nt, Homo sapiens
  source 1..21: mol_type = genomic RNA
gaacggcttcatacaggagtt

SEQ ID NO: 2994 - RNA, 21 nt, Homo sapiens
  source 1..21: mol_type = genomic RNA
aactcctgtatgaagccgttc

SEQ ID NO: 2995 - RNA, 22 nt, Homo sapiens
  source 1..22: mol_type = genomic RNA
tgtgactggttgaccagagggg

SEQ ID NO: 2996 - RNA, 22 nt, Homo sapiens
  source 1..22: mol_type = genomic RNA
cccctctggtcaaccagtcaca

SEQ ID NO: 2997 - RNA, 23 nt, Homo sapiens
  source 1..23: mol_type = genomic RNA
actgccctaagtgctccttctgg

SEQ ID NO: 2998 - RNA, 23 nt, Homo sapiens
  source 1..23: mol_type = genomic RNA
ccagaaggagcacttagggcagt

SEQ ID NO: 2999 - RNA, 23 nt, Homo sapiens
  source 1..23: mol_type = genomic RNA
taaggtgcatctagtgcagatag

SEQ ID NO: 3000 - RNA, 23 nt, Homo sapiens
  source 1..23: mol_type = genomic RNA
ctatctgcactagatgcacctta

SEQ ID NO: 3001 - RNA, 22 nt, Homo sapiens
  source 1..22: mol_type = genomic RNA
cagtgcaatgatgaaagggcat

SEQ ID NO: 3002 - RNA, 22 nt, Homo sapiens
  source 1..22: mol_type = genomic RNA
atgccctttcatcattgcactg

SEQ ID NO: 3003 - RNA, 21 nt, Homo sapiens
  source 1..21: mol_type = genomic RNA
actctttccctgttgcactac

SEQ ID NO: 3004 - RNA, 21 nt, Homo sapiens
  source 1..21: mol_type = genomic RNA
gtagtgcaacagggaaagagt

SEQ ID NO: 3005 - RNA, 24 nt, Homo sapiens
  source 1..24: mol_type = genomic RNA
tttggcaatggtagaactcacact

SEQ ID NO: 3006 - RNA, 24 nt, Homo sapiens
  source 1..24: mol_type = genomic RNA
agtgtgagttctaccattgccaaa

SEQ ID NO: 3007 - RNA, 21 nt, Homo sapiens
  source 1..21: mol_type = genomic RNA
agggccccccctcaatcctgt

SEQ ID NO: 3008 - RNA, 21 nt, Homo sapiens
  source 1..21: mol_type = genomic RNA
acaggattgagggggggccct

SEQ ID NO: 3009 - RNA, 22 nt, Homo sapiens
  source 1..22: mol_type = genomic RNA
cagtgcaatgttaaaagggcat

SEQ ID NO: 3010 - RNA, 22 nt, Homo sapiens
  source 1..22: mol_type = genomic RNA
atgcccttttaacattgcactg

SEQ ID NO: 3011 - RNA, 22 nt, Homo sapiens
  source 1..22: mol_type = genomic RNA
ttcacattgtgctactgtctgc

SEQ ID NO: 3012 - RNA, 22 nt, Homo sapiens
  source 1..22: mol_type = genomic RNA
gcagacagtagcacaatgtgaa

SEQ ID NO: 3013 - RNA, 22 nt, Homo sapiens
  source 1..22: mol_type = genomic RNA
tcggatccgtctgagcttggct

SEQ ID NO: 3014 - RNA, 22 nt, Homo sapiens
  source 1..22: mol_type = genomic RNA
agccaagctcagacggatccga

SEQ ID NO: 3015 - RNA, 22 nt, Homo sapiens
  source 1..22: mol_type = genomic RNA
ctgaagctcagagggctctgat

SEQ ID NO: 3016 - RNA, 22 nt, Homo sapiens
  source 1..22: mol_type = genomic RNA
atcagagccctctgagcttcag

SEQ ID NO: 3017 - RNA, 22 nt, Homo sapiens
  source 1..22: mol_type = genomic RNA
cctcttccccttgtctctccag

SEQ ID NO: 3018 - RNA, 22 nt, Homo sapiens
  source 1..22: mol_type = genomic RNA
ctggagagacaaggggaagagg

SEQ ID NO: 3019 - RNA, 22 nt, Homo sapiens
  source 1..22: mol_type = genomic RNA
tgagtgacaggggaaatgggga

SEQ ID NO: 3020 - RNA, 22 nt, Homo sapiens
  source 1..22: mol_type = genomic RNA
tccccatttcccctgtcactca

SEQ ID NO: 3021 - RNA, 22 nt, Homo sapiens
  source 1..22: mol_type = genomic RNA
tcaggacacttctgaacttgga

SEQ ID NO: 3022 - RNA, 22 nt, Homo sapiens
  source 1..22: mol_type = genomic RNA
tccaagttcagaagtgtcctga

SEQ ID NO: 3023 - RNA, 22 nt, Homo sapiens
  source 1..22: mol_type = genomic RNA
cagttcagaagtgttcctgagt

SEQ ID NO: 3024 - RNA, 22 nt, Homo sapiens
  source 1..22: mol_type = genomic RNA
actcaggaacacttctgaactg

SEQ ID NO: 3025 - RNA, 21 nt, Homo sapiens
  source 1..21: mol_type = genomic RNA
tttccctttccatcctggcag

SEQ ID NO: 3026 - RNA, 21 nt, Homo sapiens
  source 1..21: mol_type = genomic RNA
ctgccaggatggaaagggaaa

SEQ ID NO: 3027 - RNA, 21 nt, Homo sapiens
  source 1..21: mol_type = genomic RNA
ttgccagggcaggaggtggaa

SEQ ID NO: 3028 - RNA, 21 nt, Homo sapiens
  source 1..21: mol_type = genomic RNA
ttccacctcctgccctggcaa

SEQ ID NO: 3029 - RNA, 21 nt, Homo sapiens
  source 1..21: mol_type = genomic RNA
agagattggtagaaatcaggt

SEQ ID NO: 3030 - RNA, 21 nt, Homo sapiens
  source 1..21: mol_type = genomic RNA
acctgatttctaccaatctct

SEQ ID NO: 3031 - RNA, 23 nt, Homo sapiens
  source 1..23: mol_type = genomic RNA
aatcggacccatttaaaccggag

SEQ ID NO: 3032 - RNA, 23 nt, Homo sapiens
  source 1..23: mol_type = genomic RNA
ctccggtttaaatgggtccgatt

SEQ ID NO: 3033 - RNA, 24 nt, Homo sapiens
  source 1..24: mol_type = genomic RNA
tctgggcacaggcggatggacagg

SEQ ID NO: 3034 - RNA, 24 nt, Homo sapiens
  source 1..24: mol_type = genomic RNA
cctgtccatccgcctgtgcccaga

SEQ ID NO: 3035 - RNA, 21 nt, Homo sapiens
  source 1..21: mol_type = genomic RNA
ccagtgactgagctggagcca

SEQ ID NO: 3036 - RNA, 21 nt, Homo sapiens
  source 1..21: mol_type = genomic RNA
tggctccagctcagtcactgg

SEQ ID NO: 3037 - RNA, 22 nt, Homo sapiens
  source 1..22: mol_type = genomic RNA
aggataggaagaatgaagtgct

SEQ ID NO: 3038 - RNA, 22 nt, Homo sapiens
  source 1..22: mol_type = genomic RNA
agcacttcattcttcctatcct

SEQ ID NO: 3039 - RNA, 22 nt, Homo sapiens
  source 1..22: mol_type = genomic RNA
aggagagtggattccaggtggt

SEQ ID NO: 3040 - RNA, 22 nt, Homo sapiens
  source 1..22: mol_type = genomic RNA
accacctggaatccactctcct

SEQ ID NO: 3041 - RNA, 22 nt, Homo sapiens
  source 1..22: mol_type = genomic RNA
tcctcctctacctcatcccagt

SEQ ID NO: 3042 - RNA, 22 nt, Homo sapiens
  source 1..22: mol_type = genomic RNA
actgggatgaggtagaggagga

SEQ ID NO: 3043 - RNA, 22 nt, Homo sapiens
  source 1..22: mol_type = genomic RNA
tgaggggtttggaatgggatgg

SEQ ID NO: 3044 - RNA, 22 nt, Homo sapiens
  source 1..22: mol_type = genomic RNA
ccatcccattccaaacccctca

SEQ ID NO: 3045 - RNA, 21 nt, Homo sapiens
  source 1..21: mol_type = genomic RNA
atccagttctctgagggggct

SEQ ID NO: 3046 - RNA, 21 nt, Homo sapiens
  source 1..21: mol_type = genomic RNA
agccccctcagagaactggat

SEQ ID NO: 3047 - RNA, 22 nt, Homo sapiens
  source 1..22: mol_type = genomic RNA
aacccctaaggcaactggatgg

SEQ ID NO: 3048 - RNA, 22 nt, Homo sapiens
  source 1..22: mol_type = genomic RNA
ccatccagttgccttaggggtt

SEQ ID NO: 3049 - RNA, 21 nt, Homo sapiens
  source 1..21: mol_type = genomic RNA
tcatcctcgtctccctcccag

SEQ ID NO: 3050 - RNA, 21 nt, Homo sapiens
  source 1..21: mol_type = genomic RNA
ctgggagggagacgaggatga

SEQ ID NO: 3051 - RNA, 22 nt, Homo sapiens
  source 1..22: mol_type = genomic RNA
agggaaggggacgagggttggg

SEQ ID NO: 3052 - RNA, 22 nt, Homo sapiens
  source 1..22: mol_type = genomic RNA
cccaaccctcgtccccttccct

SEQ ID NO: 3053 - RNA, 23 nt, Homo sapiens
  source 1..23: mol_type = genomic RNA
aagaagagactgagtcatcgaat

SEQ ID NO: 3054 - RNA, 23 nt, Homo sapiens
  source 1..23: mol_type = genomic RNA
attcgatgactcagtctcttctt

SEQ ID NO: 3055 - RNA, 23 nt, Homo sapiens
  source 1..23: mol_type = genomic RNA
caatggcacaaactcattcttga

SEQ ID NO: 3056 - RNA, 23 nt, Homo sapiens
  source 1..23: mol_type = genomic RNA
tcaagaatgagtttgtgccattg

SEQ ID NO: 3057 - RNA, 21 nt, Homo sapiens
  source 1..21: mol_type = genomic RNA
actgaatcctcttttcctcag

SEQ ID NO: 3058 - RNA, 21 nt, Homo sapiens
  source 1..21: mol_type = genomic RNA
ctgaggaaaagaggattcagt

SEQ ID NO: 3059 - RNA, 22 nt, Homo sapiens
  source 1..22: mol_type = genomic RNA
tgggatgagggattgaagtgga

SEQ ID NO: 3060 - RNA, 22 nt, Homo sapiens
  source 1..22: mol_type = genomic RNA
tccacttcaatccctcatccca

SEQ ID NO: 3061 - RNA, 22 nt, Homo sapiens
  source 1..22: mol_type = genomic RNA
caggccatattgtgctgcctca

SEQ ID NO: 3062 - RNA, 22 nt, Homo sapiens
  source 1..22: mol_type = genomic RNA
tgaggcagcacaatatggcctg

SEQ ID NO: 3063 - RNA, 22 nt, Homo sapiens
  source 1..22: mol_type = genomic RNA
tagcagcacataatggtttgtg

SEQ ID NO: 3064 - RNA, 22 nt, Homo sapiens
  source 1..22: mol_type = genomic RNA
cacaaaccattatgtgctgcta

SEQ ID NO: 3065 - RNA, 22 nt, Homo sapiens
  source 1..22: mol_type = genomic RNA
cgaatcattatttgctgctcta

SEQ ID NO: 3066 - RNA, 22 nt, Homo sapiens
  source 1..22: mol_type = genomic RNA
tagagcagcaaataatgattcg

SEQ ID NO: 3067 - RNA, 22 nt, Homo sapiens
  source 1..22: mol_type = genomic RNA
tagcagcacatcatggtttaca

SEQ ID NO: 3068 - RNA, 22 nt, Homo sapiens
  source 1..22: mol_type = genomic RNA
tgtaaaccatgatgtgctgcta

SEQ ID NO: 3069 - RNA, 22 nt, Homo sapiens
  source 1..22: mol_type = genomic RNA
ccaatattactgtgctgcttta

SEQ ID NO: 3070 - RNA, 22 nt, Homo sapiens
  source 1..22: mol_type = genomic RNA
taaagcagcacagtaatattgg

SEQ ID NO: 3071 - RNA, 22 nt, Homo sapiens
  source 1..22: mol_type = genomic RNA
ctaggtatggtcccagggatcc

SEQ ID NO: 3072 - RNA, 22 nt, Homo sapiens
  source 1..22: mol_type = genomic RNA
ggatccctgggaccatacctag

SEQ ID NO: 3073 - RNA, 20 nt, Homo sapiens
  source 1..20: mol_type = genomic RNA
gtgtgtggaaatgcttctgc

SEQ ID NO: 3074 - RNA, 20 nt, Homo sapiens
  source 1..20: mol_type = genomic RNA
gcagaagcatttccacacac

SEQ ID NO: 3075 - RNA, 22 nt, Homo sapiens
  source 1..22: mol_type = genomic RNA
gtgtgcggaaatgcttctgcta

SEQ ID NO: 3076 - RNA, 22 nt, Homo sapiens
  source 1..22: mol_type = genomic RNA
tagcagaagcatttccgcacac

SEQ ID NO: 3077 - RNA, 23 nt, Homo sapiens
  source 1..23: mol_type = genomic RNA
agcagcattgtacagggctatca

SEQ ID NO: 3078 - RNA, 23 nt, Homo sapiens
  source 1..23: mol_type = genomic RNA
tgatagccctgtacaatgctgct

SEQ ID NO: 3079 - RNA, 22 nt, Homo sapiens
  source 1..22: mol_type = genomic RNA
aactggccctcaaagtcccgct

SEQ ID NO: 3080 - RNA, 22 nt, Homo sapiens
  source 1..22: mol_type = genomic RNA
agcgggactttgagggccagtt

SEQ ID NO: 3081 - RNA, 22 nt, Homo sapiens
  source 1..22: mol_type = genomic RNA
cggggttttgagggcgagatga

SEQ ID NO: 3082 - RNA, 22 nt, Homo sapiens
  source 1..22: mol_type = genomic RNA
tcatctcgccctcaaaaccccg

SEQ ID NO: 3083 - RNA, 21 nt, Homo sapiens
  source 1..21: mol_type = genomic RNA
gcagggacagcaaaggggtgc

SEQ ID NO: 3084 - RNA, 21 nt, Homo sapiens
  source 1..21: mol_type = genomic RNA
gcacccctttgctgtccctgc

SEQ ID NO: 3085 - RNA, 22 nt, Homo sapiens
  source 1..22: mol_type = genomic RNA
ttccctttgtcatccttcgcct

SEQ ID NO: 3086 - RNA, 22 nt, Homo sapiens
  source 1..22: mol_type = genomic RNA
aggcgaaggatgacaaagggaa

SEQ ID NO: 3087 - RNA, 23 nt, Homo sapiens
  source 1..23: mol_type = genomic RNA
atggccaaaactgcagttatttt

SEQ ID NO: 3088 - RNA, 23 nt, Homo sapiens
  source 1..23: mol_type = genomic RNA
aaaataactgcagttttggccat

SEQ ID NO: 3089 - RNA, 25 nt, Homo sapiens
  source 1..25: mol_type = genomic RNA
aaaaaccacaattacttttgcacca

SEQ ID NO: 3090 - RNA, 25 nt, Homo sapiens
  source 1..25: mol_type = genomic RNA
tggtgcaaaagtaattgtggttttt

SEQ ID NO: 3091 - RNA, 21 nt, Homo sapiens
  source 1..21: mol_type = genomic RNA
caaaagtgatcgtggtttttg

SEQ ID NO: 3092 - RNA, 21 nt, Homo sapiens
  source 1..21: mol_type = genomic RNA
caaaaaccacgatcacttttg

SEQ ID NO: 3093 - RNA, 23 nt, Homo sapiens
  source 1..23: mol_type = genomic RNA
caaagactgcaattacttttgcg

SEQ ID NO: 3094 - RNA, 23 nt, Homo sapiens
  source 1..23: mol_type = genomic RNA
cgcaaaagtaattgcagtctttg

SEQ ID NO: 3095 - RNA, 23 nt, Homo sapiens
  source 1..23: mol_type = genomic RNA
aaaagtaactgcggtttttgcct

SEQ ID NO: 3096 - RNA, 23 nt, Homo sapiens
  source 1..23: mol_type = genomic RNA
aggcaaaaaccgcagttactttt

SEQ ID NO: 3097 - RNA, 22 nt, Homo sapiens
  source 1..22: mol_type = genomic RNA
tgcctggaacatagtagggact

SEQ ID NO: 3098 - RNA, 22 nt, Homo sapiens
  source 1..22: mol_type = genomic RNA
agtccctactatgttccaggca

SEQ ID NO: 3099 - RNA, 21 nt, Homo sapiens
  source 1..21: mol_type = genomic RNA
ataggactcatatagtgccag

SEQ ID NO: 3100 - RNA, 21 nt, Homo sapiens
  source 1..21: mol_type = genomic RNA
ctggcactatatgagtcctat

SEQ ID NO: 3101 - RNA, 20 nt, Homo sapiens
  source 1..20: mol_type = genomic RNA
agacactatacgagtcatat

SEQ ID NO: 3102 - RNA, 20 nt, Homo sapiens
  source 1..20: mol_type = genomic RNA
atatgactcgtatagtgtct

SEQ ID NO: 3103 - RNA, 23 nt, Homo sapiens
  source 1..23: mol_type = genomic RNA
tgtgactgcattatgaaaattct

SEQ ID NO: 3104 - RNA, 23 nt, Homo sapiens
  source 1..23: mol_type = genomic RNA
agaattttcataatgcagtcaca

SEQ ID NO: 3105 - RNA, 20 nt, Homo sapiens
  source 1..20: mol_type = genomic RNA
tggcttttaactttgatggc

SEQ ID NO: 3106 - RNA, 20 nt, Homo sapiens
  source 1..20: mol_type = genomic RNA
gccatcaaagttaaaagcca

SEQ ID NO: 3107 - RNA, 21 nt, Homo sapiens
  source 1..21: mol_type = genomic RNA
cacagcaagtgtagacaggca

SEQ ID NO: 3108 - RNA, 21 nt, Homo sapiens
  source 1..21: mol_type = genomic RNA
tgcctgtctacacttgctgtg

SEQ ID NO: 3109 - RNA, 21 nt, Homo sapiens
  source 1..21: mol_type = genomic RNA
cctgtctgtgcctgctgtaca

SEQ ID NO: 3110 - RNA, 21 nt, Homo sapiens
  source 1..21: mol_type = genomic RNA
tgtacagcaggcacagacagg

SEQ ID NO: 3111 - RNA, 22 nt, Homo sapiens
  source 1..22: mol_type = genomic RNA
taaatagagtaggcaaaggaca

SEQ ID NO: 3112 - RNA, 22 nt, Homo sapiens
  source 1..22: mol_type = genomic RNA
tgtcctttgcctactctattta

SEQ ID NO: 3113 - RNA, 22 nt, Homo sapiens
  source 1..22: mol_type = genomic RNA
tcctttgcctattctatttaag

SEQ ID NO: 3114 - RNA, 22 nt, Homo sapiens
  source 1..22: mol_type = genomic RNA
cttaaatagaataggcaaagga

SEQ ID NO: 3115 - RNA, 22 nt, Homo sapiens
  source 1..22: mol_type = genomic RNA
gttgggacaagaggacggtctt

SEQ ID NO: 3116 - RNA, 22 nt, Homo sapiens
  source 1..22: mol_type = genomic RNA
aagaccgtcctcttgtcccaac

SEQ ID NO: 3117 - RNA, 17 nt, Homo sapiens
  source 1..17: mol_type = genomic RNA
cagagaattgtttaatc

SEQ ID NO: 3118 - RNA, 17 nt, Homo sapiens
  source 1..17: mol_type = genomic RNA
gattaaacaattctctg

SEQ ID NO: 3119 - RNA, 20 nt, Homo sapiens
  source 1..20: mol_type = genomic RNA
tagaggaagctgtggagaga

SEQ ID NO: 3120 - RNA, 20 nt, Homo sapiens
  source 1..20: mol_type = genomic RNA
tctctccacagcttcctcta

SEQ ID NO: 3121 - RNA, 22 nt, Homo sapiens
  source 1..22: mol_type = genomic RNA
tccccttctgcaggcctgctgg

SEQ ID NO: 3122 - RNA, 22 nt, Homo sapiens
  source 1..22: mol_type = genomic RNA
ccagcaggcctgcagaagggga

SEQ ID NO: 3123 - RNA, 23 nt, Homo sapiens
  source 1..23: mol_type = genomic RNA
atcagggcttgtggaatgggaag

SEQ ID NO: 3124 - RNA, 23 nt, Homo sapiens
  source 1..23: mol_type = genomic RNA
cttcccattccacaagccctgat

SEQ ID NO: 3125 - RNA, 23 nt, Homo sapiens
  source 1..23: mol_type = genomic RNA
tctggcaagtaaaaaactctcat

SEQ ID NO: 3126 - RNA, 23 nt, Homo sapiens
  source 1..23: mol_type = genomic RNA
atgagagttttttacttgccaga

SEQ ID NO: 3127 - RNA, 23 nt, Homo sapiens
  source 1..23: mol_type = genomic RNA
tcgaggactggtggaagggcctt

SEQ ID NO: 3128 - RNA, 23 nt, Homo sapiens
  source 1..23: mol_type = genomic RNA
aaggcccttccaccagtcctcga

SEQ ID NO: 3129 - RNA, 24 nt, Homo sapiens
  source 1..24: mol_type = genomic RNA
tgggtagagaaggagctcagagga

SEQ ID NO: 3130 - RNA, 24 nt, Homo sapiens
  source 1..24: mol_type = genomic RNA
tcctctgagctccttctctaccca

SEQ ID NO: 3131 - RNA, 22 nt, Homo sapiens
  source 1..22: mol_type = genomic RNA
taaagaactcttaaaacccaat

SEQ ID NO: 3132 - RNA, 22 nt, Homo sapiens
  source 1..22: mol_type = genomic RNA
attgggttttaagagttcttta

SEQ ID NO: 3133 - RNA, 23 nt, Homo sapiens
  source 1..23: mol_type = genomic RNA
tgatggataaaagactacatatt

SEQ ID NO: 3134 - RNA, 23 nt, Homo sapiens
  source 1..23: mol_type = genomic RNA
aatatgtagtcttttatccatca

SEQ ID NO: 3135 - RNA, 22 nt, Homo sapiens
  source 1..22: mol_type = genomic RNA
tgcctaggctgagactgcagtg

SEQ ID NO: 3136 - RNA, 22 nt, Homo sapiens
  source 1..22: mol_type = genomic RNA
cactgcagtctcagcctaggca

SEQ ID NO: 3137 - RNA, 22 nt, Homo sapiens
  source 1..22: mol_type = genomic RNA
tggcccaacctattcagttagt

SEQ ID NO: 3138 - RNA, 22 nt, Homo sapiens
  source 1..22: mol_type = genomic RNA
actaactgaataggttgggcca

SEQ ID NO: 3139 - RNA, 23 nt, Homo sapiens
  source 1..23: mol_type = genomic RNA
ctgactgaataggtagggtcatt

SEQ ID NO: 3140 - RNA, 23 nt, Homo sapiens
  source 1..23: mol_type = genomic RNA
aatgaccctacctattcagtcag

SEQ ID NO: 3141 - RNA, 24 nt, Homo sapiens
  source 1..24: mol_type = genomic RNA
tctgtagcctgggagcaatggggt

SEQ ID NO: 3142 - RNA, 24 nt, Homo sapiens
  source 1..24: mol_type = genomic RNA
accccattgctcccaggctacaga

SEQ ID NO: 3143 - RNA, 23 nt, Homo sapiens
  source 1..23: mol_type = genomic RNA
taggagctcaacagatgcctgtt

SEQ ID NO: 3144 - RNA, 23 nt, Homo sapiens
  source 1..23: mol_type = genomic RNA
aacaggcatctgttgagctccta

SEQ ID NO: 3145 - RNA, 19 nt, Homo sapiens
  source 1..19: mol_type = genomic RNA
gagggcgggtggaggagga

SEQ ID NO: 3146 - RNA, 19 nt, Homo sapiens
  source 1..19: mol_type = genomic RNA
tcctcctccacccgccctc

SEQ ID NO: 3147 - RNA, 25 nt, Homo sapiens
  source 1..25: mol_type = genomic RNA
ataacattgtaaagcgcttctttcg

SEQ ID NO: 3148 - RNA, 25 nt, Homo sapiens
  source 1..25: mol_type = genomic RNA
cgaaagaagcgctttacaatgttat

SEQ ID NO: 3149 - RNA, 24 nt, Homo sapiens
  source 1..24: mol_type = genomic RNA
agatattttgagtgtttggaattg

SEQ ID NO: 3150 - RNA, 24 nt, Homo sapiens
  source 1..24: mol_type = genomic RNA
caattccaaacactcaaaatatct

SEQ ID NO: 3151 - RNA, 22 nt, Homo sapiens
  source 1..22: mol_type = genomic RNA
aactccaaacactcaaaactca

SEQ ID NO: 3152 - RNA, 22 nt, Homo sapiens
  source 1..22: mol_type = genomic RNA
tgagttttgagtgtttggagtt

SEQ ID NO: 3153 - RNA, 22 nt, Homo sapiens
  source 1..22: mol_type = genomic RNA
catgctaggatagaaagaatgg

SEQ ID NO: 3154 - RNA, 22 nt, Homo sapiens
  source 1..22: mol_type = genomic RNA
ccattctttctatcctagcatg

SEQ ID NO: 3155 - RNA, 24 nt, Homo sapiens
  source 1..24: mol_type = genomic RNA
ggttgggcagtgaggagggtgtga

SEQ ID NO: 3156 - RNA, 24 nt, Homo sapiens
  source 1..24: mol_type = genomic RNA
tcacaccctcctcactgcccaacc

SEQ ID NO: 3157 - RNA, 22 nt, Homo sapiens
  source 1..22: mol_type = genomic RNA
tggaaaaaactggtgtgtgctt

SEQ ID NO: 3158 - RNA, 22 nt, Homo sapiens
  source 1..22: mol_type = genomic RNA
aagcacacaccagttttttcca

SEQ ID NO: 3159 - RNA, 22 nt, Homo sapiens
  source 1..22: mol_type = genomic RNA
ctggggagatcctcgaggttgg

SEQ ID NO: 3160 - RNA, 22 nt, Homo sapiens
  source 1..22: mol_type = genomic RNA
ccaacctcgaggatctccccag

SEQ ID NO: 3161 - RNA, 22 nt, Homo sapiens
  source 1..22: mol_type = genomic RNA
caacctcgacgatctcctcagc

SEQ ID NO: 3162 - RNA, 22 nt, Homo sapiens
  source 1..22: mol_type = genomic RNA
gctgaggagatcgtcgaggttg

SEQ ID NO: 3163 - RNA, 21 nt, Homo sapiens
  source 1..21: mol_type = genomic RNA
tgaggagatcgtcgaggttgg

SEQ ID NO: 3164 - RNA, 21 nt, Homo sapiens
  source 1..21: mol_type = genomic RNA
ccaacctcgacgatctcctca

SEQ ID NO: 3165 - RNA, 22 nt, Homo sapiens
  source 1..22: mol_type = genomic RNA
caacctcgaggatctccccagc

SEQ ID NO: 3166 - RNA, 22 nt, Homo sapiens
  source 1..22: mol_type = genomic RNA
gctggggagatcctcgaggttg

SEQ ID NO: 3167 - RNA, 21 nt, Homo sapiens
  source 1..21: mol_type = genomic RNA
ggtggggcaatgggatcaggt

SEQ ID NO: 3168 - RNA, 21 nt, Homo sapiens
  source 1..21: mol_type = genomic RNA
acctgatcccattgccccacc

SEQ ID NO: 3169 - RNA, 23 nt, Homo sapiens
  source 1..23: mol_type = genomic RNA
ggggaaagcgagtagggacattt

SEQ ID NO: 3170 - RNA, 23 nt, Homo sapiens
  source 1..23: mol_type = genomic RNA
aaatgtccctactcgctttcccc

SEQ ID NO: 3171 - RNA, 22 nt, Homo sapiens
  source 1..22: mol_type = genomic RNA
cagaaggggagttgggagcaga

SEQ ID NO: 3172 - RNA, 22 nt, Homo sapiens
  source 1..22: mol_type = genomic RNA
tctgctcccaactccccttctg

SEQ ID NO: 3173 - RNA, 21 nt, Homo sapiens
  source 1..21: mol_type = genomic RNA
ccaggctctgcagtgggaact

SEQ ID NO: 3174 - RNA, 21 nt, Homo sapiens
  source 1..21: mol_type = genomic RNA
agttcccactgcagagcctgg

SEQ ID NO: 3175 - RNA, 21 nt, Homo sapiens
  source 1..21: mol_type = genomic RNA
ctcccacttccagatctttct

SEQ ID NO: 3176 - RNA, 21 nt, Homo sapiens
  source 1..21: mol_type = genomic RNA
agaaagatctggaagtgggag

SEQ ID NO: 3177 - RNA, 22 nt, Homo sapiens
  source 1..22: mol_type = genomic RNA
aaagatctggaagtgggagaca

SEQ ID NO: 3178 - RNA, 22 nt, Homo sapiens
  source 1..22: mol_type = genomic RNA
tgtctcccacttccagatcttt

SEQ ID NO: 3179 - RNA, 22 nt, Homo sapiens
  source 1..22: mol_type = genomic RNA
ctgccctagtctagctgaagct

SEQ ID NO: 3180 - RNA, 22 nt, Homo sapiens
  source 1..22: mol_type = genomic RNA
agcttcagctagactagggcag

SEQ ID NO: 3181 - RNA, 22 nt, Homo sapiens
  source 1..22: mol_type = genomic RNA
ttcagccaggctagtgcagtct

SEQ ID NO: 3182 - RNA, 22 nt, Homo sapiens
  source 1..22: mol_type = genomic RNA
agactgcactagcctggctgaa

SEQ ID NO: 3183 - RNA, 22 nt, Homo sapiens
  source 1..22: mol_type = genomic RNA
taggattacaagtgtcggccac

SEQ ID NO: 3184 - RNA, 22 nt, Homo sapiens
  source 1..22: mol_type = genomic RNA
gtggccgacacttgtaatccta

SEQ ID NO: 3185 - RNA, 22 nt, Homo sapiens
  source 1..22: mol_type = genomic RNA
agagctgagactagaaagccca

SEQ ID NO: 3186 - RNA, 22 nt, Homo sapiens
  source 1..22: mol_type = genomic RNA
tgggctttctagtctcagctct

SEQ ID NO: 3187 - RNA, 22 nt, Homo sapiens
  source 1..22: mol_type = genomic RNA
ggctttctagtctcagctctcc

SEQ ID NO: 3188 - RNA, 22 nt, Homo sapiens
  source 1..22: mol_type = genomic RNA
ggagagctgagactagaaagcc

SEQ ID NO: 3189 - RNA, 23 nt, Homo sapiens
  source 1..23: mol_type = genomic RNA
ctgataagaacagaggcccagat

SEQ ID NO: 3190 - RNA, 23 nt, Homo sapiens
  source 1..23: mol_type = genomic RNA
atctgggcctctgttcttatcag

SEQ ID NO: 3191 - RNA, 21 nt, Homo sapiens
  source 1..21: mol_type = genomic RNA
tccctacccctccactcccca

SEQ ID NO: 3192 - RNA, 21 nt, Homo sapiens
  source 1..21: mol_type = genomic RNA
tggggagtggaggggtaggga

SEQ ID NO: 3193 - RNA, 23 nt, Homo sapiens
  source 1..23: mol_type = genomic RNA
ttagggagtagaagggtggggag

SEQ ID NO: 3194 - RNA, 23 nt, Homo sapiens
  source 1..23: mol_type = genomic RNA
ctccccacccttctactccctaa

SEQ ID NO: 3195 - RNA, 22 nt, Homo sapiens
  source 1..22: mol_type = genomic RNA
tataaaatgagggcagtaagac

SEQ ID NO: 3196 - RNA, 22 nt, Homo sapiens
  source 1..22: mol_type = genomic RNA
gtcttactgccctcattttata

SEQ ID NO: 3197 - RNA, 22 nt, Homo sapiens
  source 1..22: mol_type = genomic RNA
tgtgactttaagggaaatggcg

SEQ ID NO: 3198 - RNA, 22 nt, Homo sapiens
  source 1..22: mol_type = genomic RNA
cgccatttcccttaaagtcaca

SEQ ID NO: 3199 - RNA, 22 nt, Homo sapiens
  source 1..22: mol_type = genomic RNA
aggtggatgcaatgtgacctca

SEQ ID NO: 3200 - RNA, 22 nt, Homo sapiens
  source 1..22: mol_type = genomic RNA
tgaggtcacattgcatccacct

SEQ ID NO: 3201 - RNA, 23 nt, Homo sapiens
  source 1..23: mol_type = genomic RNA
cgcagacaatgcctactggccta

SEQ ID NO: 3202 - RNA, 23 nt, Homo sapiens
  source 1..23: mol_type = genomic RNA
taggccagtaggcattgtctgcg

SEQ ID NO: 3203 - RNA, 17 nt, Homo sapiens
  source 1..17: mol_type = genomic RNA
gagttctacagtcagac

SEQ ID NO: 3204 - RNA, 17 nt, Homo sapiens
  source 1..17: mol_type = genomic RNA
gtctgactgtagaactc

SEQ ID NO: 3205 - RNA, 22 nt, Homo sapiens
  source 1..22: mol_type = genomic RNA
taggactgtgcttggcacatag

SEQ ID NO: 3206 - RNA, 22 nt, Homo sapiens
  source 1..22: mol_type = genomic RNA
ctatgtgccaagcacagtccta

SEQ ID NO: 3207 - RNA, 22 nt, Homo sapiens
  source 1..22: mol_type = genomic RNA
ctggggttctgagacagacagt

SEQ ID NO: 3208 - RNA, 22 nt, Homo sapiens
  source 1..22: mol_type = genomic RNA
actgtctgtctcagaaccccag

SEQ ID NO: 3209 - RNA, 22 nt, Homo sapiens
  source 1..22: mol_type = genomic RNA
aaaggaggaaataggcaggcca

SEQ ID NO: 3210 - RNA, 22 nt, Homo sapiens
  source 1..22: mol_type = genomic RNA
tggcctgcctatttcctccttt

SEQ ID NO: 3211 - RNA, 22 nt, Homo sapiens
  source 1..22: mol_type = genomic RNA
tgccctgcctgttttctccttt

SEQ ID NO: 3212 - RNA, 22 nt, Homo sapiens
  source 1..22: mol_type = genomic RNA
aaaggagaaaacaggcagggca

SEQ ID NO: 3213 - RNA, 23 nt, Homo sapiens
  source 1..23: mol_type = genomic RNA
tagtgagttagagatgcagagcc

SEQ ID NO: 3214 - RNA, 23 nt, Homo sapiens
  source 1..23: mol_type = genomic RNA
ggctctgcatctctaactcacta

SEQ ID NO: 3215 - RNA, 19 nt, Homo sapiens
  source 1..19: mol_type = genomic RNA
actggcctgggactaccgg

SEQ ID NO: 3216 - RNA, 19 nt, Homo sapiens
  source 1..19: mol_type = genomic RNA
ccggtagtcccaggccagt

SEQ ID NO: 3217 - RNA, 21 nt, Homo sapiens
  source 1..21: mol_type = genomic RNA
tgcacggcactggggacacgt

SEQ ID NO: 3218 - RNA, 21 nt, Homo sapiens
  source 1..21: mol_type = genomic RNA
acgtgtccccagtgccgtgca

SEQ ID NO: 3219 - RNA, 23 nt, Homo sapiens
  source 1..23: mol_type = genomic RNA
tgtgtacacacgtgccaggcgct

SEQ ID NO: 3220 - RNA, 23 nt, Homo sapiens
  source 1..23: mol_type = genomic RNA
agcgcctggcacgtgtgtacaca

SEQ ID NO: 3221 - RNA, 17 nt, Homo sapiens
  source 1..17: mol_type = genomic RNA
ggggcgcggccggatcg

SEQ ID NO: 3222 - RNA, 17 nt, Homo sapiens
  source 1..17: mol_type = genomic RNA
cgatccggccgcgcccc

SEQ ID NO: 3223 - RNA, 22 nt, Homo sapiens
  source 1..22: mol_type = genomic RNA
agaaggggtgaaatttaaacgt

SEQ ID NO: 3224 - RNA, 22 nt, Homo sapiens
  source 1..22: mol_type = genomic RNA
acgtttaaatttcaccccttct

SEQ ID NO: 3225 - RNA, 19 nt, Homo sapiens
  source 1..19: mol_type = genomic RNA
atcgggccctcggcgccgg

SEQ ID NO: 3226 - RNA, 19 nt, Homo sapiens
  source 1..19: mol_type = genomic RNA
ccggcgccgagggcccgat

SEQ ID NO: 3227 - RNA, 17 nt, Homo sapiens
  source 1..17: mol_type = genomic RNA
gcttctgtagtgtagtc

SEQ ID NO: 3228 - RNA, 17 nt, Homo sapiens
  source 1..17: mol_type = genomic RNA
gactacactacagaagc

SEQ ID NO: 3229 - RNA, 22 nt, Homo sapiens
  source 1..22: mol_type = genomic RNA
gcctctctcggagtcgctcgga

SEQ ID NO: 3230 - RNA, 22 nt, Homo sapiens
  source 1..22: mol_type = genomic RNA
tccgagcgactccgagagaggc

SEQ ID NO: 3231 - RNA, 23 nt, Homo sapiens
  source 1..23: mol_type = genomic RNA
aaagtctcgctctctgcccctca

SEQ ID NO: 3232 - RNA, 23 nt, Homo sapiens
  source 1..23: mol_type = genomic RNA
tgaggggcagagagcgagacttt

SEQ ID NO: 3233 - RNA, 24 nt, Homo sapiens
  source 1..24: mol_type = genomic RNA
tgaggggcctcagaccgagctttt

SEQ ID NO: 3234 - RNA, 24 nt, Homo sapiens
  source 1..24: mol_type = genomic RNA
aaaagctcggtctgaggcccctca

SEQ ID NO: 3235 - RNA, 23 nt, Homo sapiens
  source 1..23: mol_type = genomic RNA
agaagaaggcggtcggtctgcgg

SEQ ID NO: 3236 - RNA, 23 nt, Homo sapiens
  source 1..23: mol_type = genomic RNA
ccgcagaccgaccgccttcttct

SEQ ID NO: 3237 - RNA, 20 nt, Homo sapiens
  source 1..20: mol_type = genomic RNA
ttggccatggggctgcgcgg

SEQ ID NO: 3238 - RNA, 20 nt, Homo sapiens
  source 1..20: mol_type = genomic RNA
ccgcgcagccccatggccaa

SEQ ID NO: 3239 - RNA, 23 nt, Homo sapiens
  source 1..23: mol_type = genomic RNA
cctgggcagcgtgtggctgaagg

SEQ ID NO: 3240 - RNA, 23 nt, Homo sapiens
  source 1..23: mol_type = genomic RNA
ccttcagccacacgctgcccagg

SEQ ID NO: 3241 - RNA, 23 nt, Homo sapiens
  source 1..23: mol_type = genomic RNA
agaggctttgtgcggatacgggg

SEQ ID NO: 3242 - RNA, 23 nt, Homo sapiens
  source 1..23: mol_type = genomic RNA
ccccgtatccgcacaaagcctct

SEQ ID NO: 3243 - RNA, 21 nt, Homo sapiens
  source 1..21: mol_type = genomic RNA
cccttgggtctgatggggtag

SEQ ID NO: 3244 - RNA, 21 nt, Homo sapiens
  source 1..21: mol_type = genomic RNA
ctaccccatcagacccaaggg

SEQ ID NO: 3245 - RNA, 25 nt, Homo sapiens
  source 1..25: mol_type = genomic RNA
tgccccatctgtgccctgggtagga

SEQ ID NO: 3246 - RNA, 25 nt, Homo sapiens
  source 1..25: mol_type = genomic RNA
tcctacccagggcacagatggggca

SEQ ID NO: 3247 - RNA, 23 nt, Homo sapiens
  source 1..23: mol_type = genomic RNA
tgtggaaggtagacggccagaga

SEQ ID NO: 3248 - RNA, 23 nt, Homo sapiens
  source 1..23: mol_type = genomic RNA
tctctggccgtctaccttccaca

SEQ ID NO: 3249 - RNA, 20 nt, Homo sapiens
  source 1..20: mol_type = genomic RNA
tctggccagctacgtcccca

SEQ ID NO: 3250 - RNA, 20 nt, Homo sapiens
  source 1..20: mol_type = genomic RNA
tggggacgtagctggccaga

SEQ ID NO: 3251 - RNA, 23 nt, Homo sapiens
  source 1..23: mol_type = genomic RNA
tggggacgtagctggccagacag

SEQ ID NO: 3252 - RNA, 23 nt, Homo sapiens
  source 1..23: mol_type = genomic RNA
ctgtctggccagctacgtcccca

SEQ ID NO: 3253 - RNA, 22 nt, Homo sapiens
  source 1..22: mol_type = genomic RNA
ctctctggccgtctaccttcca

SEQ ID NO: 3254 - RNA, 22 nt, Homo sapiens
  source 1..22: mol_type = genomic RNA
tggaaggtagacggccagagag

SEQ ID NO: 3255 - RNA, 23 nt, Homo sapiens
  source 1..23: mol_type = genomic RNA
tctgggaggttgtagcagtggaa

SEQ ID NO: 3256 - RNA, 23 nt, Homo sapiens
  source 1..23: mol_type = genomic RNA
ttccactgctacaacctcccaga

SEQ ID NO: 3257 - RNA, 22 nt, Homo sapiens
  source 1..22: mol_type = genomic RNA
tcctgcgtaggatctgaggagt

SEQ ID NO: 3258 - RNA, 22 nt, Homo sapiens
  source 1..22: mol_type = genomic RNA
actcctcagatcctacgcagga

SEQ ID NO: 3259 - RNA, 22 nt, Homo sapiens
  source 1..22: mol_type = genomic RNA
agctctgctgctcactggcagt

SEQ ID NO: 3260 - RNA, 22 nt, Homo sapiens
  source 1..22: mol_type = genomic RNA
actgccagtgagcagcagagct

SEQ ID NO: 3261 - RNA, 21 nt, Homo sapiens
  source 1..21: mol_type = genomic RNA
ggccagccaccaggagggctg

SEQ ID NO: 3262 - RNA, 21 nt, Homo sapiens
  source 1..21: mol_type = genomic RNA
cagccctcctggtggctggcc

SEQ ID NO: 3263 - RNA, 17 nt, Homo sapiens
  source 1..17: mol_type = genomic RNA
cgcgccgggcccgggtt

SEQ ID NO: 3264 - RNA, 17 nt, Homo sapiens
  source 1..17: mol_type = genomic RNA
aacccgggcccggcgcg

SEQ ID NO: 3265 - RNA, 23 nt, Homo sapiens
  source 1..23: mol_type = genomic RNA
ggaggcgcaggctcggaaaggcg

SEQ ID NO: 3266 - RNA, 23 nt, Homo sapiens
  source 1..23: mol_type = genomic RNA
cgcctttccgagcctgcgcctcc

SEQ ID NO: 3267 - RNA, 22 nt, Homo sapiens
  source 1..22: mol_type = genomic RNA
gtggagtcctggggaatggaga

SEQ ID NO: 3268 - RNA, 22 nt, Homo sapiens
  source 1..22: mol_type = genomic RNA
tctccattccccaggactccac

SEQ ID NO: 3269 - RNA, 23 nt, Homo sapiens
  source 1..23: mol_type = genomic RNA
agggactgccttaggagaaagtt

SEQ ID NO: 3270 - RNA, 23 nt, Homo sapiens
  source 1..23: mol_type = genomic RNA
aactttctcctaaggcagtccct

SEQ ID NO: 3271 - RNA, 17 nt, Homo sapiens
  source 1..17: mol_type = genomic RNA
gggatatgaagaaaaat

SEQ ID NO: 3272 - RNA, 17 nt, Homo sapiens
  source 1..17: mol_type = genomic RNA
atttttcttcatatccc

SEQ ID NO: 3273 - RNA, 22 nt, Homo sapiens
  source 1..22: mol_type = genomic RNA
tggaagggagaagagctttaat

SEQ ID NO: 3274 - RNA, 22 nt, Homo sapiens
  source 1..22: mol_type = genomic RNA
attaaagctcttctcccttcca

SEQ ID NO: 3275 - RNA, 22 nt, Homo sapiens
  source 1..22: mol_type = genomic RNA
actttcctcactcccgtgaagt

SEQ ID NO: 3276 - RNA, 22 nt, Homo sapiens
  source 1..22: mol_type = genomic RNA
acttcacgggagtgaggaaagt

SEQ ID NO: 3277 - RNA, 21 nt, Homo sapiens
  source 1..21: mol_type = genomic RNA
ttcgcgggcgaaggcaaagtc

SEQ ID NO: 3278 - RNA, 21 nt, Homo sapiens
  source 1..21: mol_type = genomic RNA
gactttgccttcgcccgcgaa

SEQ ID NO: 3279 - RNA, 22 nt, Homo sapiens
  source 1..22: mol_type = genomic RNA
catctggcatccgtcacacaga

SEQ ID NO: 3280 - RNA, 22 nt, Homo sapiens
  source 1..22: mol_type = genomic RNA
tctgtgtgacggatgccagatg

SEQ ID NO: 3281 - RNA, 22 nt, Homo sapiens
  source 1..22: mol_type = genomic RNA
tgagggacagatgccagaagca

SEQ ID NO: 3282 - RNA, 22 nt, Homo sapiens
  source 1..22: mol_type = genomic RNA
tgcttctggcatctgtccctca

SEQ ID NO: 3283 - RNA, 22 nt, Homo sapiens
  source 1..22: mol_type = genomic RNA
aaactaatctctacactgctgc

SEQ ID NO: 3284 - RNA, 22 nt, Homo sapiens
  source 1..22: mol_type = genomic RNA
gcagcagtgtagagattagttt

SEQ ID NO: 3285 - RNA, 22 nt, Homo sapiens
  source 1..22: mol_type = genomic RNA
gcagtagtgtagagattggttt

SEQ ID NO: 3286 - RNA, 22 nt, Homo sapiens
  source 1..22: mol_type = genomic RNA
aaaccaatctctacactactgc

SEQ ID NO: 3287 - RNA, 21 nt, Homo sapiens
  source 1..21: mol_type = genomic RNA
gctgcaccggagactgggtaa

SEQ ID NO: 3288 - RNA, 21 nt, Homo sapiens
  source 1..21: mol_type = genomic RNA
ttacccagtctccggtgcagc

SEQ ID NO: 3289 - RNA, 21 nt, Homo sapiens
  source 1..21: mol_type = genomic RNA
tacccagtctccggtgcagcc

SEQ ID NO: 3290 - RNA, 21 nt, Homo sapiens
  source 1..21: mol_type = genomic RNA
ggctgcaccggagactgggta

SEQ ID NO: 3291 - RNA, 24 nt, Homo sapiens
  source 1..24: mol_type = genomic RNA
tgtggacagtgaggtagagggagt

SEQ ID NO: 3292 - RNA, 24 nt, Homo sapiens
  source 1..24: mol_type = genomic RNA
actccctctacctcactgtccaca

SEQ ID NO: 3293 - RNA, 22 nt, Homo sapiens
  source 1..22: mol_type = genomic RNA
agcttttgggaattcaggtagt

SEQ ID NO: 3294 - RNA, 22 nt, Homo sapiens
  source 1..22: mol_type = genomic RNA
actacctgaattcccaaaagct

SEQ ID NO: 3295 - RNA, 21 nt, Homo sapiens
  source 1..21: mol_type = genomic RNA
acctgaattaccaaaagcttt

SEQ ID NO: 3296 - RNA, 21 nt, Homo sapiens
  source 1..21: mol_type = genomic RNA
aaagcttttggtaattcaggt

SEQ ID NO: 3297 - RNA, 22 nt, Homo sapiens
  source 1..22: mol_type = genomic RNA
atatacctgttcggtctcttta

SEQ ID NO: 3298 - RNA, 22 nt, Homo sapiens
  source 1..22: mol_type = genomic RNA
taaagagaccgaacaggtatat

SEQ ID NO: 3299 - RNA, 22 nt, Homo sapiens
  source 1..22: mol_type = genomic RNA
aggggaccaaagagatatatag

SEQ ID NO: 3300 - RNA, 22 nt, Homo sapiens
  source 1..22: mol_type = genomic RNA
ctatatatctctttggtcccct

SEQ ID NO: 3301 - RNA, 23 nt, Homo sapiens
  source 1..23: mol_type = genomic RNA
tttgtatggatatgtgtgtgtat

SEQ ID NO: 3302 - RNA, 23 nt, Homo sapiens
  source 1..23: mol_type = genomic RNA
atacacacacatatccatacaaa

SEQ ID NO: 3303 - RNA, 22 nt, Homo sapiens
  source 1..22: mol_type = genomic RNA
tgtgttagaataggggcaataa

SEQ ID NO: 3304 - RNA, 22 nt, Homo sapiens
  source 1..22: mol_type = genomic RNA
ttattgcccctattctaacaca

SEQ ID NO: 3305 - RNA, 22 nt, Homo sapiens
  source 1..22: mol_type = genomic RNA
attgcctctgttctaacacaag

SEQ ID NO: 3306 - RNA, 22 nt, Homo sapiens
  source 1..22: mol_type = genomic RNA
cttgtgttagaacagaggcaat

SEQ ID NO: 3307 - RNA, 22 nt, Homo sapiens
  source 1..22: mol_type = genomic RNA
aagggcttcctctctgcaggac

SEQ ID NO: 3308 - RNA, 22 nt, Homo sapiens
  source 1..22: mol_type = genomic RNA
gtcctgcagagaggaagccctt

SEQ ID NO: 3309 - RNA, 21 nt, Homo sapiens
  source 1..21: mol_type = genomic RNA
cctgcagagaggaagcccttc

SEQ ID NO: 3310 - RNA, 21 nt, Homo sapiens
  source 1..21: mol_type = genomic RNA
gaagggcttcctctctgcagg

SEQ ID NO: 3311 - RNA, 22 nt, Homo sapiens
  source 1..22: mol_type = genomic RNA
aggatttcagaaatactggtgt

SEQ ID NO: 3312 - RNA, 22 nt, Homo sapiens
  source 1..22: mol_type = genomic RNA
acaccagtatttctgaaatcct

SEQ ID NO: 3313 - RNA, 24 nt, Homo sapiens
  source 1..24: mol_type = genomic RNA
agatgtatggaatctgtatatatc

SEQ ID NO: 3314 - RNA, 24 nt, Homo sapiens
  source 1..24: mol_type = genomic RNA
gatatatacagattccatacatct

SEQ ID NO: 3315 - RNA, 22 nt, Homo sapiens
  source 1..22: mol_type = genomic RNA
cggggagagaacgcagtgacgt

SEQ ID NO: 3316 - RNA, 22 nt, Homo sapiens
  source 1..22: mol_type = genomic RNA
acgtcactgcgttctctccccg

SEQ ID NO: 3317 - RNA, 19 nt, Homo sapiens
  source 1..19: mol_type = genomic RNA
tggggcggagcttccggag

SEQ ID NO: 3318 - RNA, 19 nt, Homo sapiens
  source 1..19: mol_type = genomic RNA
ctccggaagctccgcccca

SEQ ID NO: 3319 - RNA, 21 nt, Homo sapiens
  source 1..21: mol_type = genomic RNA
tcacgcggagagatggctttg

SEQ ID NO: 3320 - RNA, 21 nt, Homo sapiens
  source 1..21: mol_type = genomic RNA
caaagccatctctccgcgtga

SEQ ID NO: 3321 - RNA, 22 nt, Homo sapiens
  source 1..22: mol_type = genomic RNA
caggcgtctgtctacgtggctt

SEQ ID NO: 3322 - RNA, 22 nt, Homo sapiens
  source 1..22: mol_type = genomic RNA
aagccacgtagacagacgcctg

SEQ ID NO: 3323 - RNA, 22 nt, Homo sapiens
  source 1..22: mol_type = genomic RNA
caccttgcgctactcaggtctg

SEQ ID NO: 3324 - RNA, 22 nt, Homo sapiens
  source 1..22: mol_type = genomic RNA
cagacctgagtagcgcaaggtg

SEQ ID NO: 3325 - RNA, 22 nt, Homo sapiens
  source 1..22: mol_type = genomic RNA
aatctgagaaggcgcacaaggt

SEQ ID NO: 3326 - RNA, 22 nt, Homo sapiens
  source 1..22: mol_type = genomic RNA
accttgtgcgccttctcagatt

SEQ ID NO: 3327 - RNA, 22 nt, Homo sapiens
  source 1..22: mol_type = genomic RNA
aaggcctttctgaaccttcaga

SEQ ID NO: 3328 - RNA, 22 nt, Homo sapiens
  source 1..22: mol_type = genomic RNA
tctgaaggttcagaaaggcctt

SEQ ID NO: 3329 - RNA, 22 nt, Homo sapiens
  source 1..22: mol_type = genomic RNA
gtgacatcacatatacggcagc

SEQ ID NO: 3330 - RNA, 22 nt, Homo sapiens
  source 1..22: mol_type = genomic RNA
gctgccgtatatgtgatgtcac

SEQ ID NO: 3331 - RNA, 24 nt, Homo sapiens
  source 1..24: mol_type = genomic RNA
tcagaacaaatgccggttcccaga

SEQ ID NO: 3332 - RNA, 24 nt, Homo sapiens
  source 1..24: mol_type = genomic RNA
tctgggaaccggcatttgttctga

SEQ ID NO: 3333 - RNA, 22 nt, Homo sapiens
  source 1..22: mol_type = genomic RNA
tgagaaccacgtctgctctgag

SEQ ID NO: 3334 - RNA, 22 nt, Homo sapiens
  source 1..22: mol_type = genomic RNA
ctcagagcagacgtggttctca

SEQ ID NO: 3335 - RNA, 17 nt, Homo sapiens
  source 1..17: mol_type = genomic RNA
tcatattgcttctttct

SEQ ID NO: 3336 - RNA, 17 nt, Homo sapiens
  source 1..17: mol_type = genomic RNA
agaaagaagcaatatga

SEQ ID NO: 3337 - RNA, 22 nt, Homo sapiens
  source 1..22: mol_type = genomic RNA
tgtgacagattgataactgaaa

SEQ ID NO: 3338 - RNA, 22 nt, Homo sapiens
  source 1..22: mol_type = genomic RNA
tttcagttatcaatctgtcaca

SEQ ID NO: 3339 - RNA, 23 nt, Homo sapiens
  source 1..23: mol_type = genomic RNA
tggagtccaggaatctgcatttt

SEQ ID NO: 3340 - RNA, 23 nt, Homo sapiens
  source 1..23: mol_type = genomic RNA
aaaatgcagattcctggactcca

SEQ ID NO: 3341 - RNA, 22 nt, Homo sapiens
  source 1..22: mol_type = genomic RNA
aagcccttaccccaaaaagtat

SEQ ID NO: 3342 - RNA, 22 nt, Homo sapiens
  source 1..22: mol_type = genomic RNA
atactttttggggtaagggctt

SEQ ID NO: 3343 - RNA, 22 nt, Homo sapiens
  source 1..22: mol_type = genomic RNA
aagcccttaccccaaaaagcat

SEQ ID NO: 3344 - RNA, 22 nt, Homo sapiens
  source 1..22: mol_type = genomic RNA
atgctttttggggtaagggctt

SEQ ID NO: 3345 - RNA, 22 nt, Homo sapiens
  source 1..22: mol_type = genomic RNA
tggaatgtaaggaagtgtgtgg

SEQ ID NO: 3346 - RNA, 22 nt, Homo sapiens
  source 1..22: mol_type = genomic RNA
ccacacacttccttacattcca

SEQ ID NO: 3347 - RNA, 22 nt, Homo sapiens
  source 1..22: mol_type = genomic RNA
cttatcagattgtattgtaatt

SEQ ID NO: 3348 - RNA, 22 nt, Homo sapiens
  source 1..22: mol_type = genomic RNA
aattacaatacaatctgataag

SEQ ID NO: 3349 - RNA, 22 nt, Homo sapiens
  source 1..22: mol_type = genomic RNA
ttataatacaacctgataagtg

SEQ ID NO: 3350 - RNA, 22 nt, Homo sapiens
  source 1..22: mol_type = genomic RNA
cacttatcaggttgtattataa

SEQ ID NO: 3351 - RNA, 22 nt, Homo sapiens
  source 1..22: mol_type = genomic RNA
cttagcaggttgtattatcatt

SEQ ID NO: 3352 - RNA, 22 nt, Homo sapiens
  source 1..22: mol_type = genomic RNA
aatgataatacaacctgctaag

SEQ ID NO: 3353 - RNA, 22 nt, Homo sapiens
  source 1..22: mol_type = genomic RNA
atataatacaacctgctaagtg

SEQ ID NO: 3354 - RNA, 22 nt, Homo sapiens
  source 1..22: mol_type = genomic RNA
cacttagcaggttgtattatat

SEQ ID NO: 3355 - RNA, 22 nt, Homo sapiens
  source 1..22: mol_type = genomic RNA
cacttagcaggttgtattatat

SEQ ID NO: 3356 - RNA, 22 nt, Homo sapiens
  source 1..22: mol_type = genomic RNA
atataatacaacctgctaagtg

SEQ ID NO: 3357 - RNA, 22 nt, Homo sapiens
  source 1..22: mol_type = genomic RNA
ataatacaacctgctaagtgct

SEQ ID NO: 3358 - RNA, 22 nt, Homo sapiens
  source 1..22: mol_type = genomic RNA
agcacttagcaggttgtattat

SEQ ID NO: 3359 - RNA, 22 nt, Homo sapiens
  source 1..22: mol_type = genomic RNA
tttggtccccttcaaccagctg

SEQ ID NO: 3360 - RNA, 22 nt, Homo sapiens
  source 1..22: mol_type = genomic RNA
cagctggttgaaggggaccaaa

SEQ ID NO: 3361 - RNA, 22 nt, Homo sapiens
  source 1..22: mol_type = genomic RNA
tttggtccccttcaaccagcta

SEQ ID NO: 3362 - RNA, 22 nt, Homo sapiens
  source 1..22: mol_type = genomic RNA
tagctggttgaaggggaccaaa

SEQ ID NO: 3363 - RNA, 22 nt, Homo sapiens
  source 1..22: mol_type = genomic RNA
tgtaaacatccttgactggaag

SEQ ID NO: 3364 - RNA, 22 nt, Homo sapiens
  source 1..22: mol_type = genomic RNA
cttccagtcaaggatgtttaca

SEQ ID NO: 3365 - RNA, 22 nt, Homo sapiens
  source 1..22: mol_type = genomic RNA
tgtcagtttgtcaaatacccca

SEQ ID NO: 3366 - RNA, 22 nt, Homo sapiens
  source 1..22: mol_type = genomic RNA
tggggtatttgacaaactgaca

SEQ ID NO: 3367 - RNA, 22 nt, Homo sapiens
  source 1..22: mol_type = genomic RNA
cgtgtatttgacaagctgagtt

SEQ ID NO: 3368 - RNA, 22 nt, Homo sapiens
  source 1..22: mol_type = genomic RNA
aactcagcttgtcaaatacacg

SEQ ID NO: 3369 - RNA, 21 nt, Homo sapiens
  source 1..21: mol_type = genomic RNA
ttcacagtggctaagttccgc

SEQ ID NO: 3370 - RNA, 21 nt, Homo sapiens
  source 1..21: mol_type = genomic RNA
gcggaacttagccactgtgaa

SEQ ID NO: 3371 - RNA, 22 nt, Homo sapiens
  source 1..22: mol_type = genomic RNA
agggcttagctgcttgtgagca

SEQ ID NO: 3372 - RNA, 22 nt, Homo sapiens
  source 1..22: mol_type = genomic RNA
tgctcacaagcagctaagccct

SEQ ID NO: 3373 - RNA, 21 nt, Homo sapiens
  source 1..21: mol_type = genomic RNA
atcacattgccagggattacc

SEQ ID NO: 3374 - RNA, 21 nt, Homo sapiens
  source 1..21: mol_type = genomic RNA
ggtaatccctggcaatgtgat

SEQ ID NO: 3375 - RNA, 22 nt, Homo sapiens
  source 1..22: mol_type = genomic RNA
tgggttcctggcatgctgattt

SEQ ID NO: 3376 - RNA, 22 nt, Homo sapiens
  source 1..22: mol_type = genomic RNA
aaatcagcatgccaggaaccca

SEQ ID NO: 3377 - RNA, 22 nt, Homo sapiens
  source 1..22: mol_type = genomic RNA
ctttcagtcggatgtttacagc

SEQ ID NO: 3378 - RNA, 22 nt, Homo sapiens
  source 1..22: mol_type = genomic RNA
gctgtaaacatccgactgaaag

SEQ ID NO: 3379 - RNA, 22 nt, Homo sapiens
  source 1..22: mol_type = genomic RNA
tgcctactgagctgatatcagt

SEQ ID NO: 3380 - RNA, 22 nt, Homo sapiens
  source 1..22: mol_type = genomic RNA
actgatatcagctcagtaggca

SEQ ID NO: 3381 - RNA, 22 nt, Homo sapiens
  source 1..22: mol_type = genomic RNA
tgcctactgagctgaaacacag

SEQ ID NO: 3382 - RNA, 22 nt, Homo sapiens
  source 1..22: mol_type = genomic RNA
ctgtgtttcagctcagtaggca

SEQ ID NO: 3383 - RNA, 22 nt, Homo sapiens
  source 1..22: mol_type = genomic RNA
tggctcagttcagcaggaacag

SEQ ID NO: 3384 - RNA, 22 nt, Homo sapiens
  source 1..22: mol_type = genomic RNA
ctgttcctgctgaactgagcca

SEQ ID NO: 3385 - RNA, 21 nt, Homo sapiens
  source 1..21: mol_type = genomic RNA
ttcacagtggctaagttctgc

SEQ ID NO: 3386 - RNA, 21 nt, Homo sapiens
  source 1..21: mol_type = genomic RNA
gcagaacttagccactgtgaa

SEQ ID NO: 3387 - RNA, 22 nt, Homo sapiens
  source 1..22: mol_type = genomic RNA
agagcttagctgattggtgaac

SEQ ID NO: 3388 - RNA, 22 nt, Homo sapiens
  source 1..22: mol_type = genomic RNA
gttcaccaatcagctaagctct

SEQ ID NO: 3389 - RNA, 23 nt, Homo sapiens
  source 1..23: mol_type = genomic RNA
tgtagtgtttcctactttatgga

SEQ ID NO: 3390 - RNA, 23 nt, Homo sapiens
  source 1..23: mol_type = genomic RNA
tccataaagtaggaaacactaca

SEQ ID NO: 3391 - RNA, 21 nt, Homo sapiens
  source 1..21: mol_type = genomic RNA
cataaagtagaaagcactact

SEQ ID NO: 3392 - RNA, 21 nt, Homo sapiens
  source 1..21: mol_type = genomic RNA
agtagtgctttctactttatg

SEQ ID NO: 3393 - RNA, 22 nt, Homo sapiens
  source 1..22: mol_type = genomic RNA
tgaaggtctactgtgtgccagg

SEQ ID NO: 3394 - RNA, 22 nt, Homo sapiens
  source 1..22: mol_type = genomic RNA
cctggcacacagtagaccttca

SEQ ID NO: 3395 - RNA, 22 nt, Homo sapiens
  source 1..22: mol_type = genomic RNA
ttgtacatggtaggctttcatt

SEQ ID NO: 3396 - RNA, 22 nt, Homo sapiens
  source 1..22: mol_type = genomic RNA
aatgaaagcctaccatgtacaa

SEQ ID NO: 3397 - RNA, 21 nt, Homo sapiens
  source 1..21: mol_type = genomic RNA
ctggatggctcctccatgtct

SEQ ID NO: 3398 - RNA, 21 nt, Homo sapiens
  source 1..21: mol_type = genomic RNA
agacatggaggagccatccag

SEQ ID NO: 3399 - RNA, 23 nt, Homo sapiens
  source 1..23: mol_type = genomic RNA
tcttggagtaggtcattgggtgg

SEQ ID NO: 3400 - RNA, 23 nt, Homo sapiens
  source 1..23: mol_type = genomic RNA
ccacccaatgacctactccaaga

SEQ ID NO: 3401 - RNA, 22 nt, Homo sapiens
  source 1..22: mol_type = genomic RNA
ctcatctgcaaagaagtaagtg

SEQ ID NO: 3402 - RNA, 22 nt, Homo sapiens
  source 1..22: mol_type = genomic RNA
cacttacttctttgcagatgag

SEQ ID NO: 3403 - RNA, 22 nt, Homo sapiens
  source 1..22: mol_type = genomic RNA
aactgtttgcagaggaaactga

SEQ ID NO: 3404 - RNA, 22 nt, Homo sapiens
  source 1..22: mol_type = genomic RNA
tcagtttcctctgcaaacagtt

SEQ ID NO: 3405 - RNA, 22 nt, Homo sapiens
  source 1..22: mol_type = genomic RNA
cttggttcagggagggtcccca

SEQ ID NO: 3406 - RNA, 22 nt, Homo sapiens
  source 1..22: mol_type = genomic RNA
tggggaccctccctgaaccaag

SEQ ID NO: 3407 - RNA, 22 nt, Homo sapiens
  source 1..22: mol_type = genomic RNA
aggaccttccctgaaccaagga

SEQ ID NO: 3408 - RNA, 22 nt, Homo sapiens
  source 1..22: mol_type = genomic RNA
tccttggttcagggaaggtcct

SEQ ID NO: 3409 - RNA, 21 nt, Homo sapiens
  source 1..21: mol_type = genomic RNA
acctcctgtgtgcatggatta

SEQ ID NO: 3410 - RNA, 21 nt, Homo sapiens
  source 1..21: mol_type = genomic RNA
taatccatgcacacaggaggt

SEQ ID NO: 3411 - RNA, 22 nt, Homo sapiens
  source 1..22: mol_type = genomic RNA
tacccattgcatatcggagttg

SEQ ID NO: 3412 - RNA, 22 nt, Homo sapiens
  source 1..22: mol_type = genomic RNA
caactccgatatgcaatgggta

SEQ ID NO: 3413 - RNA, 18 nt, Homo sapiens
  source 1..18: mol_type = genomic RNA
aaagctgggttgagaagg

SEQ ID NO: 3414 - RNA, 18 nt, Homo sapiens
  source 1..18: mol_type = genomic RNA
ccttctcaacccagcttt

SEQ ID NO: 3415 - RNA, 20 nt, Homo sapiens
  source 1..20: mol_type = genomic RNA
ggtatccgtttggggatggt

SEQ ID NO: 3416 - RNA, 20 nt, Homo sapiens
  source 1..20: mol_type = genomic RNA
accatccccaaacggatacc

SEQ ID NO: 3417 - RNA, 22 nt, Homo sapiens
  source 1..22: mol_type = genomic RNA
gaaggcagcagtgctcccctgt

SEQ ID NO: 3418 - RNA, 22 nt, Homo sapiens
  source 1..22: mol_type = genomic RNA
acaggggagcactgctgccttc

SEQ ID NO: 3419 - RNA, 22 nt, Homo sapiens
  source 1..22: mol_type = genomic RNA
tcagtgcatcacagaactttgt

SEQ ID NO: 3420 - RNA, 22 nt, Homo sapiens
  source 1..22: mol_type = genomic RNA
acaaagttctgtgatgcactga

SEQ ID NO: 3421 - RNA, 22 nt, Homo sapiens
  source 1..22: mol_type = genomic RNA
aagttctgttatacactcaggc

SEQ ID NO: 3422 - RNA, 22 nt, Homo sapiens
  source 1..22: mol_type = genomic RNA
gcctgagtgtataacagaactt

SEQ ID NO: 3423 - RNA, 22 nt, Homo sapiens
  source 1..22: mol_type = genomic RNA
ctggccctctctgcccttccgt

SEQ ID NO: 3424 - RNA, 22 nt, Homo sapiens
  source 1..22: mol_type = genomic RNA
acggaagggcagagagggccag

SEQ ID NO: 3425 - RNA, 21 nt, Homo sapiens
  source 1..21: mol_type = genomic RNA
ctagactgaagctccttgagg

SEQ ID NO: 3426 - RNA, 21 nt, Homo sapiens
  source 1..21: mol_type = genomic RNA
cctcaaggagcttcagtctag

SEQ ID NO: 3427 - RNA, 21 nt, Homo sapiens
  source 1..21: mol_type = genomic RNA
tcgaggagctcacagtctagt

SEQ ID NO: 3428 - RNA, 21 nt, Homo sapiens
  source 1..21: mol_type = genomic RNA
actagactgtgagctcctcga

SEQ ID NO: 3429 - RNA, 21 nt, Homo sapiens
  source 1..21: mol_type = genomic RNA
cacattacacggtcgacctct

SEQ ID NO: 3430 - RNA, 21 nt, Homo sapiens
  source 1..21: mol_type = genomic RNA
agaggtcgaccgtgtaatgtg

SEQ ID NO: 3431 - RNA, 22 nt, Homo sapiens
  source 1..22: mol_type = genomic RNA
aggtggtccgtggcgcgttcgc

SEQ ID NO: 3432 - RNA, 22 nt, Homo sapiens
  source 1..22: mol_type = genomic RNA
gcgaacgcgccacggaccacct

SEQ ID NO: 3433 - RNA, 23 nt, Homo sapiens
  source 1..23: mol_type = genomic RNA
cgcatcccctagggcattggtgt

SEQ ID NO: 3434 - RNA, 23 nt, Homo sapiens
  source 1..23: mol_type = genomic RNA
acaccaatgccctaggggatgcg

SEQ ID NO: 3435 - RNA, 20 nt, Homo sapiens
  source 1..20: mol_type = genomic RNA
cctctgggcccttcctccag

SEQ ID NO: 3436 - RNA, 20 nt, Homo sapiens
  source 1..20: mol_type = genomic RNA
ctggaggaagggcccagagg

SEQ ID NO: 3437 - RNA, 23 nt, Homo sapiens
  source 1..23: mol_type = genomic RNA
cctagtaggtgtccagtaagtgt

SEQ ID NO: 3438 - RNA, 23 nt, Homo sapiens
  source 1..23: mol_type = genomic RNA
acacttactggacacctactagg

SEQ ID NO: 3439 - RNA, 21 nt, Homo sapiens
  source 1..21: mol_type = genomic RNA
acggtgctggatgtggccttt

SEQ ID NO: 3440 - RNA, 21 nt, Homo sapiens
  source 1..21: mol_type = genomic RNA
aaaggccacatccagcaccgt

SEQ ID NO: 3441 - RNA, 23 nt, Homo sapiens
  source 1..23: mol_type = genomic RNA
tcagcaccaggatattgttggag

SEQ ID NO: 3442 - RNA, 23 nt, Homo sapiens
  source 1..23: mol_type = genomic RNA
ctccaacaatatcctggtgctga

SEQ ID NO: 3443 - RNA, 23 nt, Homo sapiens
  source 1..23: mol_type = genomic RNA
tcaacaaaatcactgatgctgga

SEQ ID NO: 3444 - RNA, 23 nt, Homo sapiens
  source 1..23: mol_type = genomic RNA
tccagcatcagtgattttgttga

SEQ ID NO: 3445 - RNA, 22 nt, Homo sapiens
  source 1..22: mol_type = genomic RNA
aacaatatcctggtgctgagtg

SEQ ID NO: 3446 - RNA, 22 nt, Homo sapiens
  source 1..22: mol_type = genomic RNA
cactcagcaccaggatattgtt

SEQ ID NO: 3447 - RNA, 23 nt, Homo sapiens
  source 1..23: mol_type = genomic RNA
ggcaggttctcaccctctctagg

SEQ ID NO: 3448 - RNA, 23 nt, Homo sapiens
  source 1..23: mol_type = genomic RNA
cctagagagggtgagaacctgcc

SEQ ID NO: 3449 - RNA, 23 nt, Homo sapiens
  source 1..23: mol_type = genomic RNA
gacacgggcgacagctgcggccc

SEQ ID NO: 3450 - RNA, 23 nt, Homo sapiens
  source 1..23: mol_type = genomic RNA
gggccgcagctgtcgcccgtgtc

SEQ ID NO: 3451 - RNA, 21 nt, Homo sapiens
  source 1..21: mol_type = genomic RNA
atgtatgtgtgcatgtgcatg

SEQ ID NO: 3452 - RNA, 21 nt, Homo sapiens
  source 1..21: mol_type = genomic RNA
catgcacatgcacacatacat

SEQ ID NO: 3453 - RNA, 22 nt, Homo sapiens
  source 1..22: mol_type = genomic RNA
tatacaagggcagactctctct

SEQ ID NO: 3454 - RNA, 22 nt, Homo sapiens
  source 1..22: mol_type = genomic RNA
agagagagtctgcccttgtata

SEQ ID NO: 3455 - RNA, 20 nt, Homo sapiens
  source 1..20: mol_type = genomic RNA
ggcggcggcggaggcggggg

SEQ ID NO: 3456 - RNA, 20 nt, Homo sapiens
  source 1..20: mol_type = genomic RNA
cccccgcctccgccgccgcc

SEQ ID NO: 3457 - RNA, 22 nt, Homo sapiens
  source 1..22: mol_type = genomic RNA
gcaggtgctcacttgtcctcct

SEQ ID NO: 3458 - RNA, 22 nt, Homo sapiens
  source 1..22: mol_type = genomic RNA
aggaggacaagtgagcacctgc

SEQ ID NO: 3459 - RNA, 19 nt, Homo sapiens
  source 1..19: mol_type = genomic RNA
ggggcctggcggtgggcgg

SEQ ID NO: 3460 - RNA, 19 nt, Homo sapiens
  source 1..19: mol_type = genomic RNA
ccgcccaccgccaggcccc

SEQ ID NO: 3461 - RNA, 22 nt, Homo sapiens
  source 1..22: mol_type = genomic RNA
gcccaaaggtgaattttttggg

SEQ ID NO: 3462 - RNA, 22 nt, Homo sapiens
  source 1..22: mol_type = genomic RNA
cccaaaaaattcacctttgggc

SEQ ID NO: 3463 - RNA, 22 nt, Homo sapiens
  source 1..22: mol_type = genomic RNA
caaagaattctccttttgggct

SEQ ID NO: 3464 - RNA, 22 nt, Homo sapiens
  source 1..22: mol_type = genomic RNA
agcccaaaaggagaattctttg

SEQ ID NO: 3465 - RNA, 22 nt, Homo sapiens
  source 1..22: mol_type = genomic RNA
ctgcaatgtaagcacttcttac

SEQ ID NO: 3466 - RNA, 22 nt, Homo sapiens
  source 1..22: mol_type = genomic RNA
gtaagaagtgcttacattgcag

SEQ ID NO: 3467 - RNA, 23 nt, Homo sapiens
  source 1..23: mol_type = genomic RNA
aaaagtgcttacagtgcaggtag

SEQ ID NO: 3468 - RNA, 23 nt, Homo sapiens
  source 1..23: mol_type = genomic RNA
ctacctgcactgtaagcactttt

SEQ ID NO: 3469 - RNA, 22 nt, Homo sapiens
  source 1..22: mol_type = genomic RNA
actgtagtatgggcacttccag

SEQ ID NO: 3470 - RNA, 22 nt, Homo sapiens
  source 1..22: mol_type = genomic RNA
ctggaagtgcccatactacagt

SEQ ID NO: 3471 - RNA, 23 nt, Homo sapiens
  source 1..23: mol_type = genomic RNA
caaagtgctcatagtgcaggtag

SEQ ID NO: 3472 - RNA, 23 nt, Homo sapiens
  source 1..23: mol_type = genomic RNA
ctacctgcactatgagcactttg

SEQ ID NO: 3473 - RNA, 23 nt, Homo sapiens
  source 1..23: mol_type = genomic RNA
ggggtattgtttccgctgccagg

SEQ ID NO: 3474 - RNA, 23 nt, Homo sapiens
  source 1..23: mol_type = genomic RNA
cctggcagcggaaacaatacccc

SEQ ID NO: 3475 - RNA, 23 nt, Homo sapiens
  source 1..23: mol_type = genomic RNA
tagcagcgggaacagttctgcag

SEQ ID NO: 3476 - RNA, 23 nt, Homo sapiens
  source 1..23: mol_type = genomic RNA
ctgcagaactgttcccgctgcta

SEQ ID NO: 3477 - RNA, 21 nt, Homo sapiens
  source 1..21: mol_type = genomic RNA
cgagcctcaagcaagggactt

SEQ ID NO: 3478 - RNA, 21 nt, Homo sapiens
  source 1..21: mol_type = genomic RNA
aagtcccttgcttgaggctcg

SEQ ID NO: 3479 - RNA, 22 nt, Homo sapiens
  source 1..22: mol_type = genomic RNA
tagtcccttccttgaagcggtc

SEQ ID NO: 3480 - RNA, 22 nt, Homo sapiens
  source 1..22: mol_type = genomic RNA
gaccgcttcaaggaagggacta

SEQ ID NO: 3481 - RNA, 21 nt, Homo sapiens
  source 1..21: mol_type = genomic RNA
actggacttggagtcagaagg

SEQ ID NO: 3482 - RNA, 21 nt, Homo sapiens
  source 1..21: mol_type = genomic RNA
ccttctgactccaagtccagt

SEQ ID NO: 3483 - RNA, 22 nt, Homo sapiens
  source 1..22: mol_type = genomic RNA
ctcctgactccaggtcctgtgt

SEQ ID NO: 3484 - RNA, 22 nt, Homo sapiens
  source 1..22: mol_type = genomic RNA
acacaggacctggagtcaggag

SEQ ID NO: 3485 - RNA, 22 nt, Homo sapiens
  source 1..22: mol_type = genomic RNA
tttgttcgttcggctcgcgtga

SEQ ID NO: 3486 - RNA, 22 nt, Homo sapiens
  source 1..22: mol_type = genomic RNA
tcacgcgagccgaacgaacaaa

SEQ ID NO: 3487 - RNA, 22 nt, Homo sapiens
  source 1..22: mol_type = genomic RNA
acggatgtttgagcatgtgcta

SEQ ID NO: 3488 - RNA, 22 nt, Homo sapiens
  source 1..22: mol_type = genomic RNA
tagcacatgctcaaacatccgt

SEQ ID NO: 3489 - RNA, 23 nt, Homo sapiens
  source 1..23: mol_type = genomic RNA
tcaaatgctcagactcctgtggt

SEQ ID NO: 3490 - RNA, 23 nt, Homo sapiens
  source 1..23: mol_type = genomic RNA
accacaggagtctgagcatttga

SEQ ID NO: 3491 - RNA, 22 nt, Homo sapiens
  source 1..22: mol_type = genomic RNA
cggcaacaagaaactgcctgag

SEQ ID NO: 3492 - RNA, 22 nt, Homo sapiens
  source 1..22: mol_type = genomic RNA
ctcaggcagtttcttgttgccg

SEQ ID NO: 3493 - RNA, 22 nt, Homo sapiens
  source 1..22: mol_type = genomic RNA
taggtagtttcatgttgttggg

SEQ ID NO: 3494 - RNA, 22 nt, Homo sapiens
  source 1..22: mol_type = genomic RNA
cccaacaacatgaaactaccta

SEQ ID NO: 3495 - RNA, 22 nt, Homo sapiens
  source 1..22: mol_type = genomic RNA
caatgtttccacagtgcatcac

SEQ ID NO: 3496 - RNA, 22 nt, Homo sapiens
  source 1..22: mol_type = genomic RNA
gtgatgcactgtggaaacattg

SEQ ID NO: 3497 - RNA, 21 nt, Homo sapiens
  source 1..21: mol_type = genomic RNA
gtgcattgtagttgcattgca

SEQ ID NO: 3498 - RNA, 21 nt, Homo sapiens
  source 1..21: mol_type = genomic RNA
tgcaatgcaactacaatgcac

SEQ ID NO: 3499 - RNA, 18 nt, Homo sapiens
  source 1..18: mol_type = genomic RNA
atcccacctctgccacca

SEQ ID NO: 3500 - RNA, 18 nt, Homo sapiens
  source 1..18: mol_type = genomic RNA
tggtggcagaggtgggat

SEQ ID NO: 3501 - RNA, 19 nt, Homo sapiens
  source 1..19: mol_type = genomic RNA
atcccaccactgccaccat

SEQ ID NO: 3502 - RNA, 19 nt, Homo sapiens
  source 1..19: mol_type = genomic RNA
atggtggcagtggtgggat

SEQ ID NO: 3503 - RNA, 22 nt, Homo sapiens
  source 1..22: mol_type = genomic RNA
accttcctctccatgggtcttt

SEQ ID NO: 3504 - RNA, 22 nt, Homo sapiens
  source 1..22: mol_type = genomic RNA
aaagacccatggagaggaaggt

SEQ ID NO: 3505 - RNA, 22 nt, Homo sapiens
  source 1..22: mol_type = genomic RNA
aaagacccattgaggagaaggt

SEQ ID NO: 3506 - RNA, 22 nt, Homo sapiens
  source 1..22: mol_type = genomic RNA
accttctcctcaatgggtcttt

SEQ ID NO: 3507 - RNA, 21 nt, Homo sapiens
  source 1..21: mol_type = genomic RNA
aatgtagagattgatcaaaat

SEQ ID NO: 3508 - RNA, 21 nt, Homo sapiens
  source 1..21: mol_type = genomic RNA
attttgatcaatctctacatt

SEQ ID NO: 3509 - RNA, 23 nt, Homo sapiens
  source 1..23: mol_type = genomic RNA
acggaatatgtatacggaatata

SEQ ID NO: 3510 - RNA, 23 nt, Homo sapiens
  source 1..23: mol_type = genomic RNA
tatattccgtatacatattccgt

SEQ ID NO: 3511 - RNA, 24 nt, Homo sapiens
  source 1..24: mol_type = genomic RNA
agagctcacagctgtccttctcta

SEQ ID NO: 3512 - RNA, 24 nt, Homo sapiens
  source 1..24: mol_type = genomic RNA
tagagaaggacagctgtgagctct

SEQ ID NO: 3513 - RNA, 22 nt, Homo sapiens
  source 1..22: mol_type = genomic RNA
atcaaataaggactagtctgca

SEQ ID NO: 3514 - RNA, 22 nt, Homo sapiens
  source 1..22: mol_type = genomic RNA
tgcagactagtccttatttgat

SEQ ID NO: 3515 - RNA, 23 nt, Homo sapiens
  source 1..23: mol_type = genomic RNA
atgagactcatgtaaaacatctt

SEQ ID NO: 3516 - RNA, 23 nt, Homo sapiens
  source 1..23: mol_type = genomic RNA
aagatgttttacatgagtctcat

SEQ ID NO: 3517 - RNA, 21 nt, Homo sapiens
  source 1..21: mol_type = genomic RNA
atggaatgtatatacggaata

SEQ ID NO: 3518 - RNA, 21 nt, Homo sapiens
  source 1..21: mol_type = genomic RNA
tattccgtatatacattccat

SEQ ID NO: 3519 - RNA, 22 nt, Homo sapiens
  source 1..22: mol_type = genomic RNA
attgtagaacctaagattggcc

SEQ ID NO: 3520 - RNA, 22 nt, Homo sapiens
  source 1..22: mol_type = genomic RNA
ggccaatcttaggttctacaat

SEQ ID NO: 3521 - RNA, 22 nt, Homo sapiens
  source 1..22: mol_type = genomic RNA
catctctaaggaactcccccaa

SEQ ID NO: 3522 - RNA, 22 nt, Homo sapiens
  source 1..22: mol_type = genomic RNA
ttgggggagttccttagagatg

SEQ ID NO: 3523 - RNA, 23 nt, Homo sapiens
  source 1..23: mol_type = genomic RNA
tatggggcttctgtagagatttc

SEQ ID NO: 3524 - RNA, 23 nt, Homo sapiens
  source 1..23: mol_type = genomic RNA
gaaatctctacagaagccccata

SEQ ID NO: 3525 - RNA, 20 nt, Homo sapiens
  source 1..20: mol_type = genomic RNA
ccgtgtttcccccacgcttt

SEQ ID NO: 3526 - RNA, 20 nt, Homo sapiens
  source 1..20: mol_type = genomic RNA
aaagcgtgggggaaacacgg

SEQ ID NO: 3527 - RNA, 15 nt, Homo sapiens
  source 1..15: mol_type = genomic RNA
aggagatcctgggtt

SEQ ID NO: 3528 - RNA, 15 nt, Homo sapiens
  source 1..15: mol_type = genomic RNA
aacccaggatctcct

SEQ ID NO: 3529 - RNA, 22 nt, Homo sapiens
  source 1..22: mol_type = genomic RNA
ctcgtgggctctggccacggcc

SEQ ID NO: 3530 - RNA, 22 nt, Homo sapiens
  source 1..22: mol_type = genomic RNA
ggccgtggccagagcccacgag

SEQ ID NO: 3531 - RNA, 22 nt, Homo sapiens
  source 1..22: mol_type = genomic RNA
cagtggccagagccctgcagtg

SEQ ID NO: 3532 - RNA, 22 nt, Homo sapiens
  source 1..22: mol_type = genomic RNA
cactgcagggctctggccactg

SEQ ID NO: 3533 - RNA, 22 nt, Homo sapiens
  source 1..22: mol_type = genomic RNA
ctgcagagtttgtacggaccgg

SEQ ID NO: 3534 - RNA, 22 nt, Homo sapiens
  source 1..22: mol_type = genomic RNA
ccggtccgtacaaactctgcag

SEQ ID NO: 3535 - RNA, 20 nt, Homo sapiens
  source 1..20: mol_type = genomic RNA
tccgtacaaactctgctgtg

SEQ ID NO: 3536 - RNA, 20 nt, Homo sapiens
  source 1..20: mol_type = genomic RNA
cacagcagagtttgtacgga

SEQ ID NO: 3537 - RNA, 22 nt, Homo sapiens
  source 1..22: mol_type = genomic RNA
cttccccccagtaatcttcatc

SEQ ID NO: 3538 - RNA, 22 nt, Homo sapiens
  source 1..22: mol_type = genomic RNA
gatgaagattactggggggaag

SEQ ID NO: 3539 - RNA, 23 nt, Homo sapiens
  source 1..23: mol_type = genomic RNA
tgaggatatggcagggaagggga

SEQ ID NO: 3540 - RNA, 23 nt, Homo sapiens
  source 1..23: mol_type = genomic RNA
tccccttccctgccatatcctca

SEQ ID NO: 3541 - RNA, 23 nt, Homo sapiens
  source 1..23: mol_type = genomic RNA
ttttgcatgaccctgggagtagg

SEQ ID NO: 3542 - RNA, 23 nt, Homo sapiens
  source 1..23: mol_type = genomic RNA
cctactcccagggtcatgcaaaa

SEQ ID NO: 3543 - RNA, 22 nt, Homo sapiens
  source 1..22: mol_type = genomic RNA
gactcactcacaggattgtgca

SEQ ID NO: 3544 - RNA, 22 nt, Homo sapiens
  source 1..22: mol_type = genomic RNA
tgcacaatcctgtgagtgagtc

SEQ ID NO: 3545 - RNA, 22 nt, Homo sapiens
  source 1..22: mol_type = genomic RNA
acacagtgcttcatccactact

SEQ ID NO: 3546 - RNA, 22 nt, Homo sapiens
  source 1..22: mol_type = genomic RNA
agtagtggatgaagcactgtgt

SEQ ID NO: 3547 - RNA, 22 nt, Homo sapiens
  source 1..22: mol_type = genomic RNA
tagtggatgatgcactctgtgc

SEQ ID NO: 3548 - RNA, 22 nt, Homo sapiens
  source 1..22: mol_type = genomic RNA
gcacagagtgcatcatccacta

SEQ ID NO: 3549 - RNA, 21 nt, Homo sapiens
  source 1..21: mol_type = genomic RNA
tgatgatacaggtggaggtag

SEQ ID NO: 3550 - RNA, 21 nt, Homo sapiens
  source 1..21: mol_type = genomic RNA
ctacctccacctgtatcatca

SEQ ID NO: 3551 - RNA, 22 nt, Homo sapiens
  source 1..22: mol_type = genomic RNA
ctacttctacctgtgttatcat

SEQ ID NO: 3552 - RNA, 22 nt, Homo sapiens
  source 1..22: mol_type = genomic RNA
atgataacacaggtagaagtag

SEQ ID NO: 3553 - RNA, 22 nt, Homo sapiens
  source 1..22: mol_type = genomic RNA
tgcgacattggaagtagtatca

SEQ ID NO: 3554 - RNA, 22 nt, Homo sapiens
  source 1..22: mol_type = genomic RNA
tgatactacttccaatgtcgca

SEQ ID NO: 3555 - RNA, 21 nt, Homo sapiens
  source 1..21: mol_type = genomic RNA
ttagacctagtacacgtcctt

SEQ ID NO: 3556 - RNA, 21 nt, Homo sapiens
  source 1..21: mol_type = genomic RNA
aaggacgtgtactaggtctaa

SEQ ID NO: 3557 - RNA, 22 nt, Homo sapiens
  source 1..22: mol_type = genomic RNA
tttcctaccctacctgaagact

SEQ ID NO: 3558 - RNA, 22 nt, Homo sapiens
  source 1..22: mol_type = genomic RNA
agtcttcaggtagggtaggaaa

SEQ ID NO: 3559 - RNA, 22 nt, Homo sapiens
  source 1..22: mol_type = genomic RNA
atctgtaagagaaagtaaatga

SEQ ID NO: 3560 - RNA, 22 nt, Homo sapiens
  source 1..22: mol_type = genomic RNA
tcatttactttctcttacagat

SEQ ID NO: 3561 - RNA, 24 nt, Homo sapiens
  source 1..24: mol_type = genomic RNA
cccggacaggcgttcgtgcgacgt

SEQ ID NO: 3562 - RNA, 24 nt, Homo sapiens
  source 1..24: mol_type = genomic RNA
acgtcgcacgaacgcctgtccggg

SEQ ID NO: 3563 - RNA, 23 nt, Homo sapiens
  source 1..23: mol_type = genomic RNA
acctggacccagcgtagacaaag

SEQ ID NO: 3564 - RNA, 23 nt, Homo sapiens
  source 1..23: mol_type = genomic RNA
ctttgtctacgctgggtccaggt

SEQ ID NO: 3565 - RNA, 22 nt, Homo sapiens
  source 1..22: mol_type = genomic RNA
accaagtctgcgtcatcctctc

SEQ ID NO: 3566 - RNA, 22 nt, Homo sapiens
  source 1..22: mol_type = genomic RNA
gagaggatgacgcagacttggt

SEQ ID NO: 3567 - RNA, 23 nt, Homo sapiens
  source 1..23: mol_type = genomic RNA
agtggatgatggagactcggtac

SEQ ID NO: 3568 - RNA, 23 nt, Homo sapiens
  source 1..23: mol_type = genomic RNA
gtaccgagtctccatcatccact

SEQ ID NO: 3569 - RNA, 24 nt, Homo sapiens
  source 1..24: mol_type = genomic RNA
gttccacactgacactgcagaagt

SEQ ID NO: 3570 - RNA, 24 nt, Homo sapiens
  source 1..24: mol_type = genomic RNA
acttctgcagtgtcagtgtggaac

SEQ ID NO: 3571 - RNA, 24 nt, Homo sapiens
  source 1..24: mol_type = genomic RNA
cctgctggtcaggagtggatactg

SEQ ID NO: 3572 - RNA, 24 nt, Homo sapiens
  source 1..24: mol_type = genomic RNA
cagtatccactcctgaccagcagg

SEQ ID NO: 3573 - RNA, 23 nt, Homo sapiens
  source 1..23: mol_type = genomic RNA
gagggtcttgggagggatgtgac

SEQ ID NO: 3574 - RNA, 23 nt, Homo sapiens
  source 1..23: mol_type = genomic RNA
gtcacatccctcccaagaccctc

SEQ ID NO: 3575 - RNA, 22 nt, Homo sapiens
  source 1..22: mol_type = genomic RNA
atatacagggggagactcttat

SEQ ID NO: 3576 - RNA, 22 nt, Homo sapiens
  source 1..22: mol_type = genomic RNA
ataagagtctccccctgtatat

SEQ ID NO: 3577 - RNA, 22 nt, Homo sapiens
  source 1..22: mol_type = genomic RNA
atatacagggggagactctcat

SEQ ID NO: 3578 - RNA, 22 nt, Homo sapiens
  source 1..22: mol_type = genomic RNA
atgagagtctccccctgtatat

SEQ ID NO: 3579 - RNA, 21 nt, Homo sapiens
  source 1..21: mol_type = genomic RNA
agaggataccctttgtatgtt

SEQ ID NO: 3580 - RNA, 21 nt, Homo sapiens
  source 1..21: mol_type = genomic RNA
aacatacaaagggtatcctct

SEQ ID NO: 3581 - RNA, 22 nt, Homo sapiens
  source 1..22: mol_type = genomic RNA
tctacaaaggaaagcgctttct

SEQ ID NO: 3582 - RNA, 22 nt, Homo sapiens
  source 1..22: mol_type = genomic RNA
agaaagcgctttcctttgtaga

SEQ ID NO: 3583 - RNA, 22 nt, Homo sapiens
  source 1..22: mol_type = genomic RNA
tcaaaactgaggggcattttct

SEQ ID NO: 3584 - RNA, 22 nt, Homo sapiens
  source 1..22: mol_type = genomic RNA
agaaaatgcccctcagttttga

SEQ ID NO: 3585 - RNA, 24 nt, Homo sapiens
  source 1..24: mol_type = genomic RNA
ttctccaaaagaaagcactttctg

SEQ ID NO: 3586 - RNA, 24 nt, Homo sapiens
  source 1..24: mol_type = genomic RNA
cagaaagtgctttcttttggagaa

SEQ ID NO: 3587 - RNA, 23 nt, Homo sapiens
  source 1..23: mol_type = genomic RNA
ttctcgaggaaagaagcactttc

SEQ ID NO: 3588 - RNA, 23 nt, Homo sapiens
  source 1..23: mol_type = genomic RNA
gaaagtgcttctttcctcgagaa

SEQ ID NO: 3589 - RNA, 22 nt, Homo sapiens
  source 1..22: mol_type = genomic RNA
cctctagatggaagcactgtct

SEQ ID NO: 3590 - RNA, 22 nt, Homo sapiens
  source 1..22: mol_type = genomic RNA
agacagtgcttccatctagagg

SEQ ID NO: 3591 - RNA, 22 nt, Homo sapiens
  source 1..22: mol_type = genomic RNA
atcgtgcatccctttagagtgt

SEQ ID NO: 3592 - RNA, 22 nt, Homo sapiens
  source 1..22: mol_type = genomic RNA
acactctaaagggatgcacgat

SEQ ID NO: 3593 - RNA, 22 nt, Homo sapiens
  source 1..22: mol_type = genomic RNA
atcgtgcatccctttagagtgt

SEQ ID NO: 3594 - RNA, 22 nt, Homo sapiens
  source 1..22: mol_type = genomic RNA
acactctaaagggatgcacgat

SEQ ID NO: 3595 - RNA, 22 nt, Homo sapiens
  source 1..22: mol_type = genomic RNA
atcgtgcatccttttagagtgt

SEQ ID NO: 3596 - RNA, 22 nt, Homo sapiens
  source 1..22: mol_type = genomic RNA
acactctaaaaggatgcacgat

SEQ ID NO: 3597 - RNA, 22 nt, Homo sapiens
  source 1..22: mol_type = genomic RNA
caaagcgctcccctttagaggt

SEQ ID NO: 3598 - RNA, 22 nt, Homo sapiens
  source 1..22: mol_type = genomic RNA
acctctaaaggggagcgctttg

SEQ ID NO: 3599 - RNA, 23 nt, Homo sapiens
  source 1..23: mol_type = genomic RNA
caaagcgcttctctttagagtgt

SEQ ID NO: 3600 - RNA, 23 nt, Homo sapiens
  source 1..23: mol_type = genomic RNA
acactctaaagagaagcgctttg

SEQ ID NO: 3601 - RNA, 23 nt, Homo sapiens
  source 1..23: mol_type = genomic RNA
tctctggagggaagcactttctg

SEQ ID NO: 3602 - RNA, 23 nt, Homo sapiens
  source 1..23: mol_type = genomic RNA
cagaaagtgcttccctccagaga

SEQ ID NO: 3603 - RNA, 21 nt, Homo sapiens
  source 1..21: mol_type = genomic RNA
gaaagcgcttctctttagagg

SEQ ID NO: 3604 - RNA, 21 nt, Homo sapiens
  source 1..21: mol_type = genomic RNA
cctctaaagagaagcgctttc

SEQ ID NO: 3605 - RNA, 22 nt, Homo sapiens
  source 1..22: mol_type = genomic RNA
ctctagagggaagcactttctc

SEQ ID NO: 3606 - RNA, 22 nt, Homo sapiens
  source 1..22: mol_type = genomic RNA
gagaaagtgcttccctctagag

SEQ ID NO: 3607 - RNA, 22 nt, Homo sapiens
  source 1..22: mol_type = genomic RNA
aaagtgcatccttttagagtgt

SEQ ID NO: 3608 - RNA, 22 nt, Homo sapiens
  source 1..22: mol_type = genomic RNA
acactctaaaaggatgcacttt

SEQ ID NO: 3609 - RNA, 22 nt, Homo sapiens
  source 1..22: mol_type = genomic RNA
ctctagagggaagcgctttctg

SEQ ID NO: 3610 - RNA, 22 nt, Homo sapiens
  source 1..22: mol_type = genomic RNA
cagaaagcgcttccctctagag

SEQ ID NO: 3611 - RNA, 22 nt, Homo sapiens
  source 1..22: mol_type = genomic RNA
caaagtgcctccctttagagtg

SEQ ID NO: 3612 - RNA, 22 nt, Homo sapiens
  source 1..22: mol_type = genomic RNA
cactctaaagggaggcactttg

SEQ ID NO: 3613 - RNA, 22 nt, Homo sapiens
  source 1..22: mol_type = genomic RNA
aagtgcctccttttagagtgtt

SEQ ID NO: 3614 - RNA, 22 nt, Homo sapiens
  source 1..22: mol_type = genomic RNA
aacactctaaaaggaggcactt

SEQ ID NO: 3615 - RNA, 22 nt, Homo sapiens
  source 1..22: mol_type = genomic RNA
ttctccaaaagggagcactttc

SEQ ID NO: 3616 - RNA, 22 nt, Homo sapiens
  source 1..22: mol_type = genomic RNA
gaaagtgctcccttttggagaa

SEQ ID NO: 3617 - RNA, 22 nt, Homo sapiens
  source 1..22: mol_type = genomic RNA
aaagtgcttccctttggactgt

SEQ ID NO: 3618 - RNA, 22 nt, Homo sapiens
  source 1..22: mol_type = genomic RNA
acagtccaaagggaagcacttt

SEQ ID NO: 3619 - RNA, 21 nt, Homo sapiens
  source 1..21: mol_type = genomic RNA
ctccagagggaagtactttct

SEQ ID NO: 3620 - RNA, 21 nt, Homo sapiens
  source 1..21: mol_type = genomic RNA
agaaagtacttccctctggag

SEQ ID NO: 3621 - RNA, 22 nt, Homo sapiens
  source 1..22: mol_type = genomic RNA
acaaagtgcttccctttagagt

SEQ ID NO: 3622 - RNA, 22 nt, Homo sapiens
  source 1..22: mol_type = genomic RNA
actctaaagggaagcactttgt

SEQ ID NO: 3623 - RNA, 22 nt, Homo sapiens
  source 1..22: mol_type = genomic RNA
ctacaaagggaagcactttctc

SEQ ID NO: 3624 - RNA, 22 nt, Homo sapiens
  source 1..22: mol_type = genomic RNA
gagaaagtgcttccctttgtag

SEQ ID NO: 3625 - RNA, 22 nt, Homo sapiens
  source 1..22: mol_type = genomic RNA
gaaggcgcttccctttagagcg

SEQ ID NO: 3626 - RNA, 22 nt, Homo sapiens
  source 1..22: mol_type = genomic RNA
cgctctaaagggaagcgccttc

SEQ ID NO: 3627 - RNA, 21 nt, Homo sapiens
  source 1..21: mol_type = genomic RNA
ctccagagggatgcactttct

SEQ ID NO: 3628 - RNA, 21 nt, Homo sapiens
  source 1..21: mol_type = genomic RNA
agaaagtgcatccctctggag

SEQ ID NO: 3629 - RNA, 22 nt, Homo sapiens
  source 1..22: mol_type = genomic RNA
ctctagagggaagcactttctg

SEQ ID NO: 3630 - RNA, 22 nt, Homo sapiens
  source 1..22: mol_type = genomic RNA
cagaaagtgcttccctctagag

SEQ ID NO: 3631 - RNA, 22 nt, Homo sapiens
  source 1..22: mol_type = genomic RNA
gaaagtgcttccttttagaggc

SEQ ID NO: 3632 - RNA, 22 nt, Homo sapiens
  source 1..22: mol_type = genomic RNA
gcctctaaaaggaagcactttc

SEQ ID NO: 3633 - RNA, 23 nt, Homo sapiens
  source 1..23: mol_type = genomic RNA
ctcttgagggaagcactttctgt

SEQ ID NO: 3634 - RNA, 23 nt, Homo sapiens
  source 1..23: mol_type = genomic RNA
acagaaagtgcttccctcaagag

SEQ ID NO: 3635 - RNA, 22 nt, Homo sapiens
  source 1..22: mol_type = genomic RNA
actggacttagggtcagaaggc

SEQ ID NO: 3636 - RNA, 22 nt, Homo sapiens
  source 1..22: mol_type = genomic RNA
gccttctgaccctaagtccagt

SEQ ID NO: 3637 - RNA, 22 nt, Homo sapiens
  source 1..22: mol_type = genomic RNA
aaacaaacatggtgcacttctt

SEQ ID NO: 3638 - RNA, 22 nt, Homo sapiens
  source 1..22: mol_type = genomic RNA
aagaagtgcaccatgtttgttt

SEQ ID NO: 3639 - RNA, 22 nt, Homo sapiens
  source 1..22: mol_type = genomic RNA
gaagttgcccatgttattttcg

SEQ ID NO: 3640 - RNA, 22 nt, Homo sapiens
  source 1..22: mol_type = genomic RNA
cgaaaataacatgggcaacttc

SEQ ID NO: 3641 - RNA, 21 nt, Homo sapiens
  source 1..21: mol_type = genomic RNA
aatcattcacggacaacactt

SEQ ID NO: 3642 - RNA, 21 nt, Homo sapiens
  source 1..21: mol_type = genomic RNA
aagtgttgtccgtgaatgatt

SEQ ID NO: 3643 - RNA, 22 nt, Homo sapiens
  source 1..22: mol_type = genomic RNA
gaagttgttcgtggtggattcg

SEQ ID NO: 3644 - RNA, 22 nt, Homo sapiens
  source 1..22: mol_type = genomic RNA
cgaatccaccacgaacaacttc

SEQ ID NO: 3645 - RNA, 23 nt, Homo sapiens
  source 1..23: mol_type = genomic RNA
cctccgtgttacctgtcctctag

SEQ ID NO: 3646 - RNA, 23 nt, Homo sapiens
  source 1..23: mol_type = genomic RNA
ctagaggacaggtaacacggagg

SEQ ID NO: 3647 - RNA, 23 nt, Homo sapiens
  source 1..23: mol_type = genomic RNA
tgaggatggatagcaaggaagcc

SEQ ID NO: 3648 - RNA, 23 nt, Homo sapiens
  source 1..23: mol_type = genomic RNA
ggcttccttgctatccatcctca

SEQ ID NO: 3649 - RNA, 22 nt, Homo sapiens
  source 1..22: mol_type = genomic RNA
ttcagatcccagcggtgcctct

SEQ ID NO: 3650 - RNA, 22 nt, Homo sapiens
  source 1..22: mol_type = genomic RNA
agaggcaccgctgggatctgaa

SEQ ID NO: 3651 - RNA, 19 nt, Homo sapiens
  source 1..19: mol_type = genomic RNA
gtcctaggaggctcctctg

SEQ ID NO: 3652 - RNA, 19 nt, Homo sapiens
  source 1..19: mol_type = genomic RNA
cagaggagcctcctaggac

SEQ ID NO: 3653 - RNA, 21 nt, Homo sapiens
  source 1..21: mol_type = genomic RNA
caattctcaaaggagcctccc

SEQ ID NO: 3654 - RNA, 21 nt, Homo sapiens
  source 1..21: mol_type = genomic RNA
gggaggctcctttgagaattg

SEQ ID NO: 3655 - RNA, 21 nt, Homo sapiens
  source 1..21: mol_type = genomic RNA
gttggggtgcaggggtctgct

SEQ ID NO: 3656 - RNA, 21 nt, Homo sapiens
  source 1..21: mol_type = genomic RNA
agcagacccctgcaccccaac

SEQ ID NO: 3657 - RNA, 22 nt, Homo sapiens
  source 1..22: mol_type = genomic RNA
tttccggctcgcgtgggtgtgt

SEQ ID NO: 3658 - RNA, 22 nt, Homo sapiens
  source 1..22: mol_type = genomic RNA
acacacccacgcgagccggaaa

SEQ ID NO: 3659 - RNA, 23 nt, Homo sapiens
  source 1..23: mol_type = genomic RNA
tgagtgtgtgtgtgtgagtgtgt

SEQ ID NO: 3660 - RNA, 23 nt, Homo sapiens
  source 1..23: mol_type = genomic RNA
acacactcacacacacacactca

SEQ ID NO: 3661 - RNA, 22 nt, Homo sapiens
  source 1..22: mol_type = genomic RNA
agtgggaggccagggcacggca

SEQ ID NO: 3662 - RNA, 22 nt, Homo sapiens
  source 1..22: mol_type = genomic RNA
tgccgtgccctggcctcccact

SEQ ID NO: 3663 - RNA, 20 nt, Homo sapiens
  source 1..20: mol_type = genomic RNA
tgagccctgtcctcccgcag

SEQ ID NO: 3664 - RNA, 20 nt, Homo sapiens
  source 1..20: mol_type = genomic RNA
ctgcgggaggacagggctca

SEQ ID NO: 3665 - RNA, 23 nt, Homo sapiens
  source 1..23: mol_type = genomic RNA
aagtgccgccatcttttgagtgt

SEQ ID NO: 3666 - RNA, 23 nt, Homo sapiens
  source 1..23: mol_type = genomic RNA
acactcaaaagatggcggcactt

SEQ ID NO: 3667 - RNA, 20 nt, Homo sapiens
  source 1..20: mol_type = genomic RNA
actcaaactgtgggggcact

SEQ ID NO: 3668 - RNA, 20 nt, Homo sapiens
  source 1..20: mol_type = genomic RNA
agtgcccccacagtttgagt

SEQ ID NO: 3669 - RNA, 23 nt, Homo sapiens
  source 1..23: mol_type = genomic RNA
aagtgcccccacagtttgagtgc

SEQ ID NO: 3670 - RNA, 23 nt, Homo sapiens
  source 1..23: mol_type = genomic RNA
gcactcaaactgtgggggcactt

SEQ ID NO: 3671 - RNA, 22 nt, Homo sapiens
  source 1..22: mol_type = genomic RNA
actcaaaagatggcggcacttt

SEQ ID NO: 3672 - RNA, 22 nt, Homo sapiens
  source 1..22: mol_type = genomic RNA
aaagtgccgccatcttttgagt

SEQ ID NO: 3673 - RNA, 22 nt, Homo sapiens
  source 1..22: mol_type = genomic RNA
aaacctgtgttgttcaagagtc

SEQ ID NO: 3674 - RNA, 22 nt, Homo sapiens
  source 1..22: mol_type = genomic RNA
gactcttgaacaacacaggttt

SEQ ID NO: 3675 - RNA, 22 nt, Homo sapiens
  source 1..22: mol_type = genomic RNA
acagtagagggaggaatcgcag

SEQ ID NO: 3676 - RNA, 22 nt, Homo sapiens
  source 1..22: mol_type = genomic RNA
ctgcgattcctccctctactgt

SEQ ID NO: 3677 - RNA, 22 nt, Homo sapiens
  source 1..22: mol_type = genomic RNA
gtgaaatgtttaggaccactag

SEQ ID NO: 3678 - RNA, 22 nt, Homo sapiens
  source 1..22: mol_type = genomic RNA
ctagtggtcctaaacatttcac

SEQ ID NO: 3679 - RNA, 23 nt, Homo sapiens
  source 1..23: mol_type = genomic RNA
ttgaactgttaagaaccactgga

SEQ ID NO: 3680 - RNA, 23 nt, Homo sapiens
  source 1..23: mol_type = genomic RNA
tccagtggttcttaacagttcaa

SEQ ID NO: 3681 - RNA, 22 nt, Homo sapiens
  source 1..22: mol_type = genomic RNA
tagtggtcctaaacatttcaca

SEQ ID NO: 3682 - RNA, 22 nt, Homo sapiens
  source 1..22: mol_type = genomic RNA
tgtgaaatgtttaggaccacta

SEQ ID NO: 3683 - RNA, 21 nt, Homo sapiens
  source 1..21: mol_type = genomic RNA
tgcaggaccaagatgagccct

SEQ ID NO: 3684 - RNA, 21 nt, Homo sapiens
  source 1..21: mol_type = genomic RNA
agggctcatcttggtcctgca

SEQ ID NO: 3685 - RNA, 21 nt, Homo sapiens
  source 1..21: mol_type = genomic RNA
ctcccacatgcagggtttgca

SEQ ID NO: 3686 - RNA, 21 nt, Homo sapiens
  source 1..21: mol_type = genomic RNA
tgcaaaccctgcatgtgggag

SEQ ID NO: 3687 - RNA, 21 nt, Homo sapiens
  source 1..21: mol_type = genomic RNA
catcccttgcatggtggaggg

SEQ ID NO: 3688 - RNA, 21 nt, Homo sapiens
  source 1..21: mol_type = genomic RNA
ccctccaccatgcaagggatg

SEQ ID NO: 3689 - RNA, 22 nt, Homo sapiens
  source 1..22: mol_type = genomic RNA
aaaatgaaatgagcccagccca

SEQ ID NO: 3690 - RNA, 22 nt, Homo sapiens
  source 1..22: mol_type = genomic RNA
tgggctgggctcatttcatttt

SEQ ID NO: 3691 - RNA, 21 nt, Homo sapiens
  source 1..21: mol_type = genomic RNA
agccgcggggatcgccgaggg

SEQ ID NO: 3692 - RNA, 21 nt, Homo sapiens
  source 1..21: mol_type = genomic RNA
ccctcggcgatccccgcggct

SEQ ID NO: 3693 - RNA, 19 nt, Homo sapiens
  source 1..19: mol_type = genomic RNA
agggacctgagtgtctaag

SEQ ID NO: 3694 - RNA, 19 nt, Homo sapiens
  source 1..19: mol_type = genomic RNA
cttagacactcaggtccct

SEQ ID NO: 3695 - RNA, 19 nt, Homo sapiens
  source 1..19: mol_type = genomic RNA
aggtgtgtctgtagagtcc

SEQ ID NO: 3696 - RNA, 19 nt, Homo sapiens
  source 1..19: mol_type = genomic RNA
ggactctacagacacacct

SEQ ID NO: 3697 - RNA, 24 nt, Homo sapiens
  source 1..24: mol_type = genomic RNA
catagcccggtcgctggtacatga

SEQ ID NO: 3698 - RNA, 24 nt, Homo sapiens
  source 1..24: mol_type = genomic RNA
tcatgtaccagcgaccgggctatg

SEQ ID NO: 3699 - RNA, 18 nt, Homo sapiens
  source 1..18: mol_type = genomic RNA
cggctggaggtgtgagga

SEQ ID NO: 3700 - RNA, 18 nt, Homo sapiens
  source 1..18: mol_type = genomic RNA
tcctcacacctccagccg

SEQ ID NO: 3701 - RNA, 18 nt, Homo sapiens
  source 1..18: mol_type = genomic RNA
ctaagaagttgactgaag

SEQ ID NO: 3702 - RNA, 18 nt, Homo sapiens
  source 1..18: mol_type = genomic RNA
cttcagtcaacttcttag

SEQ ID NO: 3703 - RNA, 19 nt, Homo sapiens
  source 1..19: mol_type = genomic RNA
gactggacaagctgaggaa

SEQ ID NO: 3704 - RNA, 19 nt, Homo sapiens
  source 1..19: mol_type = genomic RNA
ttcctcagcttgtccagtc

SEQ ID NO: 3705 - RNA, 21 nt, Homo sapiens
  source 1..21: mol_type = genomic RNA
gcttgtcgctgcggtgttgct

SEQ ID NO: 3706 - RNA, 21 nt, Homo sapiens
  source 1..21: mol_type = genomic RNA
agcaacaccgcagcgacaagc

SEQ ID NO: 3707 - RNA, 17 nt, Homo sapiens
  source 1..17: mol_type = genomic RNA
ggcgggtgcgggggtgg

SEQ ID NO: 3708 - RNA, 17 nt, Homo sapiens
  source 1..17: mol_type = genomic RNA
ccacccccgcacccgcc

SEQ ID NO: 3709 - RNA, 21 nt, Homo sapiens
  source 1..21: mol_type = genomic RNA
tgtgtcccattattggtgatt

SEQ ID NO: 3710 - RNA, 21 nt, Homo sapiens
  source 1..21: mol_type = genomic RNA
aatcaccaataatgggacaca

SEQ ID NO: 3711 - RNA, 22 nt, Homo sapiens
  source 1..22: mol_type = genomic RNA
tttaagaaaacaccatggagat

SEQ ID NO: 3712 - RNA, 22 nt, Homo sapiens
  source 1..22: mol_type = genomic RNA
atctccatggtgttttcttaaa

SEQ ID NO: 3713 - RNA, 22 nt, Homo sapiens
  source 1..22: mol_type = genomic RNA
gctatttcacgacaccagggtt

SEQ ID NO: 3714 - RNA, 22 nt, Homo sapiens
  source 1..22: mol_type = genomic RNA
aaccctggtgtcgtgaaatagc

SEQ ID NO: 3715 - RNA, 23 nt, Homo sapiens
  source 1..23: mol_type = genomic RNA
agctggtgttgtgaatcaggccg

SEQ ID NO: 3716 - RNA, 23 nt, Homo sapiens
  source 1..23: mol_type = genomic RNA
cggcctgattcacaacaccagct

SEQ ID NO: 3717 - RNA, 21 nt, Homo sapiens
  source 1..21: mol_type = genomic RNA
aataatacatggttgatcttt

SEQ ID NO: 3718 - RNA, 21 nt, Homo sapiens
  source 1..21: mol_type = genomic RNA
aaagatcaaccatgtattatt

SEQ ID NO: 3719 - RNA, 22 nt, Homo sapiens
  source 1..22: mol_type = genomic RNA
agatcgaccgtgttatattcgc

SEQ ID NO: 3720 - RNA, 22 nt, Homo sapiens
  source 1..22: mol_type = genomic RNA
gcgaatataacacggtcgatct

SEQ ID NO: 3721 - RNA, 22 nt, Homo sapiens
  source 1..22: mol_type = genomic RNA
aatcatgtgcagtgccaatatg

SEQ ID NO: 3722 - RNA, 22 nt, Homo sapiens
  source 1..22: mol_type = genomic RNA
catattggcactgcacatgatt

SEQ ID NO: 3723 - RNA, 23 nt, Homo sapiens
  source 1..23: mol_type = genomic RNA
tttggcactagcacatttttgct

SEQ ID NO: 3724 - RNA, 23 nt, Homo sapiens
  source 1..23: mol_type = genomic RNA
agcaaaaatgtgctagtgccaaa

SEQ ID NO: 3725 - RNA, 22 nt, Homo sapiens
  source 1..22: mol_type = genomic RNA
tcctgtactgagctgccccgag

SEQ ID NO: 3726 - RNA, 22 nt, Homo sapiens
  source 1..22: mol_type = genomic RNA
ctcggggcagctcagtacagga

SEQ ID NO: 3727 - RNA, 22 nt, Homo sapiens
  source 1..22: mol_type = genomic RNA
gctacttcacaacaccagggcc

SEQ ID NO: 3728 - RNA, 22 nt, Homo sapiens
  source 1..22: mol_type = genomic RNA
ggccctggtgttgtgaagtagc

SEQ ID NO: 3729 - RNA, 22 nt, Homo sapiens
  source 1..22: mol_type = genomic RNA
catcatcgtctcaaatgagtct

SEQ ID NO: 3730 - RNA, 22 nt, Homo sapiens
  source 1..22: mol_type = genomic RNA
agactcatttgagacgatgatg

SEQ ID NO: 3731 - RNA, 23 nt, Homo sapiens
  source 1..23: mol_type = genomic RNA
actccatttgttttgatgatgga

SEQ ID NO: 3732 - RNA, 23 nt, Homo sapiens
  source 1..23: mol_type = genomic RNA
tccatcatcaaaacaaatggagt

SEQ ID NO: 3733 - RNA, 22 nt, Homo sapiens
  source 1..22: mol_type = genomic RNA
ctcctacatattagcattaaca

SEQ ID NO: 3734 - RNA, 22 nt, Homo sapiens
  source 1..22: mol_type = genomic RNA
tgttaatgctaatatgtaggag

SEQ ID NO: 3735 - RNA, 23 nt, Homo sapiens
  source 1..23: mol_type = genomic RNA
ttaatgctaatcgtgataggggt

SEQ ID NO: 3736 - RNA, 23 nt, Homo sapiens
  source 1..23: mol_type = genomic RNA
acccctatcacgattagcattaa

SEQ ID NO: 3737 - RNA, 22 nt, Homo sapiens
  source 1..22: mol_type = genomic RNA
agatcagaaggtgattgtggct

SEQ ID NO: 3738 - RNA, 22 nt, Homo sapiens
  source 1..22: mol_type = genomic RNA
agccacaatcaccttctgatct

SEQ ID NO: 3739 - RNA, 22 nt, Homo sapiens
  source 1..22: mol_type = genomic RNA
tactgcagacgtggcaatcatg

SEQ ID NO: 3740 - RNA, 22 nt, Homo sapiens
  source 1..22: mol_type = genomic RNA
catgattgccacgtctgcagta

SEQ ID NO: 3741 - RNA, 21 nt, Homo sapiens
  source 1..21: mol_type = genomic RNA
gttagggccaacatctcttgg

SEQ ID NO: 3742 - RNA, 21 nt, Homo sapiens
  source 1..21: mol_type = genomic RNA
ccaagagatgttggccctaac

SEQ ID NO: 3743 - RNA, 21 nt, Homo sapiens
  source 1..21: mol_type = genomic RNA
aacatagaggaaattccacgt

SEQ ID NO: 3744 - RNA, 21 nt, Homo sapiens
  source 1..21: mol_type = genomic RNA
acgtggaatttcctctatgtt

SEQ ID NO: 3745 - RNA, 21 nt, Homo sapiens
  source 1..21: mol_type = genomic RNA
ggtggatattccttctatgtt

SEQ ID NO: 3746 - RNA, 21 nt, Homo sapiens
  source 1..21: mol_type = genomic RNA
aacatagaaggaatatccacc

SEQ ID NO: 3747 - RNA, 23 nt, Homo sapiens
  source 1..23: mol_type = genomic RNA
tcatagccctgtacaatgctgct

SEQ ID NO: 3748 - RNA, 23 nt, Homo sapiens
  source 1..23: mol_type = genomic RNA
agcagcattgtacagggctatga

SEQ ID NO: 3749 - RNA, 22 nt, Homo sapiens
  source 1..22: mol_type = genomic RNA
taacactgtctggtaaagatgg

SEQ ID NO: 3750 - RNA, 22 nt, Homo sapiens
  source 1..22: mol_type = genomic RNA
ccatctttaccagacagtgtta

SEQ ID NO: 3751 - RNA, 22 nt, Homo sapiens
  source 1..22: mol_type = genomic RNA
catcttccagtacagtgttgga

SEQ ID NO: 3752 - RNA, 22 nt, Homo sapiens
  source 1..22: mol_type = genomic RNA
tccaacactgtactggaagatg

SEQ ID NO: 3753 - RNA, 22 nt, Homo sapiens
  source 1..22: mol_type = genomic RNA
aactggcctacaaagtcccagt

SEQ ID NO: 3754 - RNA, 22 nt, Homo sapiens
  source 1..22: mol_type = genomic RNA
actgggactttgtaggccagtt

SEQ ID NO: 3755 - RNA, 22 nt, Homo sapiens
  source 1..22: mol_type = genomic RNA
tgggtctttgcgggcgagatga

SEQ ID NO: 3756 - RNA, 22 nt, Homo sapiens
  source 1..22: mol_type = genomic RNA
tcatctcgcccgcaaagaccca

SEQ ID NO: 3757 - RNA, 21 nt, Homo sapiens
  source 1..21: mol_type = genomic RNA
atgacctatgaattgacagac

SEQ ID NO: 3758 - RNA, 21 nt, Homo sapiens
  source 1..21: mol_type = genomic RNA
gtctgtcaattcataggtcat

SEQ ID NO: 3759 - RNA, 22 nt, Homo sapiens
  source 1..22: mol_type = genomic RNA
aagctgccagttgaagaactgt

SEQ ID NO: 3760 - RNA, 22 nt, Homo sapiens
  source 1..22: mol_type = genomic RNA
acagttcttcaactggcagctt

SEQ ID NO: 3761 - RNA, 22 nt, Homo sapiens
  source 1..22: mol_type = genomic RNA
agttcttcagtggcaagcttta

SEQ ID NO: 3762 - RNA, 22 nt, Homo sapiens
  source 1..22: mol_type = genomic RNA
taaagcttgccactgaagaact

SEQ ID NO: 3763 - RNA, 22 nt, Homo sapiens
  source 1..22: mol_type = genomic RNA
acagattcgattctaggggaat

SEQ ID NO: 3764 - RNA, 22 nt, Homo sapiens
  source 1..22: mol_type = genomic RNA
attcccctagaatcgaatctgt

SEQ ID NO: 3765 - RNA, 23 nt, Homo sapiens
  source 1..23: mol_type = genomic RNA
taccctgtagaaccgaatttgtg

SEQ ID NO: 3766 - RNA, 23 nt, Homo sapiens
  source 1..23: mol_type = genomic RNA
cacaaattcggttctacagggta

SEQ ID NO: 3767 - RNA, 22 nt, Homo sapiens
  source 1..22: mol_type = genomic RNA
tagcagcacgtaaatattggcg

SEQ ID NO: 3768 - RNA, 22 nt, Homo sapiens
  source 1..22: mol_type = genomic RNA
cgccaatatttacgtgctgcta

SEQ ID NO: 3769 - RNA, 21 nt, Homo sapiens
  source 1..21: mol_type = genomic RNA
tgagatgaagcactgtagctc

SEQ ID NO: 3770 - RNA, 21 nt, Homo sapiens
  source 1..21: mol_type = genomic RNA
gagctacagtgcttcatctca

SEQ ID NO: 3771 - RNA, 22 nt, Homo sapiens
  source 1..22: mol_type = genomic RNA
ggtgcagtgctgcatctctggt

SEQ ID NO: 3772 - RNA, 22 nt, Homo sapiens
  source 1..22: mol_type = genomic RNA
accagagatgcagcactgcacc

SEQ ID NO: 3773 - RNA, 21 nt, Homo sapiens
  source 1..21: mol_type = genomic RNA
ttgctcactgttcttccctag

SEQ ID NO: 3774 - RNA, 21 nt, Homo sapiens
  source 1..21: mol_type = genomic RNA
ctagggaagaacagtgagcaa

SEQ ID NO: 3775 - RNA, 18 nt, Homo sapiens
  source 1..18: mol_type = genomic RNA
cagggtcagctgagcatg

SEQ ID NO: 3776 - RNA, 18 nt, Homo sapiens
  source 1..18: mol_type = genomic RNA
catgctcagctgaccctg

SEQ ID NO: 3777 - RNA, 21 nt, Homo sapiens
  source 1..21: mol_type = genomic RNA
aagcattctttcattggttgg

SEQ ID NO: 3778 - RNA, 21 nt, Homo sapiens
  source 1..21: mol_type = genomic RNA
ccaaccaatgaaagaatgctt

SEQ ID NO: 3779 - RNA, 21 nt, Homo sapiens
  source 1..21: mol_type = genomic RNA
ccgtcgccgccacccgagccg

SEQ ID NO: 3780 - RNA, 21 nt, Homo sapiens
  source 1..21: mol_type = genomic RNA
cggctcgggtggcggcgacgg

SEQ ID NO: 3781 - RNA, 27 nt, Homo sapiens
  source 1..27: mol_type = genomic RNA
cactgtaggtgatggtgagagtgggca

SEQ ID NO: 3782 - RNA, 27 nt, Homo sapiens
  source 1..27: mol_type = genomic RNA
tgcccactctcaccatcacctacagtg

SEQ ID NO: 3783 - RNA, 23 nt, Homo sapiens
  source 1..23: mol_type = genomic RNA
gggatggtagaccggtgacgtgc

SEQ ID NO: 3784 - RNA, 23 nt, Homo sapiens
  source 1..23: mol_type = genomic RNA
gcacgtcaccggtctaccatccc

SEQ ID NO: 3785 - RNA, 21 nt, Homo sapiens
  source 1..21: mol_type = genomic RNA
taggacacatggtctacttct

SEQ ID NO: 3786 - RNA, 21 nt, Homo sapiens
  source 1..21: mol_type = genomic RNA
agaagtagaccatgtgtccta

SEQ ID NO: 3787 - RNA, 22 nt, Homo sapiens
  source 1..22: mol_type = genomic RNA
ctcctgagccattctgagcctc

SEQ ID NO: 3788 - RNA, 22 nt, Homo sapiens
  source 1..22: mol_type = genomic RNA
gaggctcagaatggctcaggag

SEQ ID NO: 3789 - RNA, 21 nt, Homo sapiens
  source 1..21: mol_type = genomic RNA
gtgccagctgcagtgggggag

SEQ ID NO: 3790 - RNA, 21 nt, Homo sapiens
  source 1..21: mol_type = genomic RNA
ctcccccactgcagctggcac

SEQ ID NO: 3791 - RNA, 21 nt, Homo sapiens
  source 1..21: mol_type = genomic RNA
cccggagccaggatgcagctc

SEQ ID NO: 3792 - RNA, 21 nt, Homo sapiens
  source 1..21: mol_type = genomic RNA
gagctgcatcctggctccggg

SEQ ID NO: 3793 - RNA, 21 nt, Homo sapiens
  source 1..21: mol_type = genomic RNA
tcgtggcctggtctccattat

SEQ ID NO: 3794 - RNA, 21 nt, Homo sapiens
  source 1..21: mol_type = genomic RNA
ataatggagaccaggccacga

SEQ ID NO: 3795 - RNA, 20 nt, Homo sapiens
  source 1..20: mol_type = genomic RNA
tctgcagggtttgctttgag

SEQ ID NO: 3796 - RNA, 20 nt, Homo sapiens
  source 1..20: mol_type = genomic RNA
ctcaaagcaaaccctgcaga

SEQ ID NO: 3797 - RNA, 21 nt, Homo sapiens
  source 1..21: mol_type = genomic RNA
tgttcatgtagatgtttaagc

SEQ ID NO: 3798 - RNA, 21 nt, Homo sapiens
  source 1..21: mol_type = genomic RNA
gcttaaacatctacatgaaca

SEQ ID NO: 3799 - RNA, 18 nt, Homo sapiens
  source 1..18: mol_type = genomic RNA
tcagctggccctcatttc

SEQ ID NO: 3800 - RNA, 18 nt, Homo sapiens
  source 1..18: mol_type = genomic RNA
gaaatgagggccagctga

SEQ ID NO: 3801 - RNA, 21 nt, Homo sapiens
  source 1..21: mol_type = genomic RNA
tggcagggaggctgggagggg

SEQ ID NO: 3802 - RNA, 21 nt, Homo sapiens
  source 1..21: mol_type = genomic RNA
cccctcccagcctccctgcca

SEQ ID NO: 3803 - RNA, 20 nt, Homo sapiens
  source 1..20: mol_type = genomic RNA
tcactgttcagacaggcgga

SEQ ID NO: 3804 - RNA, 20 nt, Homo sapiens
  source 1..20: mol_type = genomic RNA
tccgcctgtctgaacagtga

SEQ ID NO: 3805 - RNA, 21 nt, Homo sapiens
  source 1..21: mol_type = genomic RNA
ccccacctcctctctcctcag

SEQ ID NO: 3806 - RNA, 21 nt, Homo sapiens
  source 1..21: mol_type = genomic RNA
ctgaggagagaggaggtgggg

SEQ ID NO: 3807 - RNA, 19 nt, Homo sapiens
  source 1..19: mol_type = genomic RNA
gtgaggactcgggaggtgg

SEQ ID NO: 3808 - RNA, 19 nt, Homo sapiens
  source 1..19: mol_type = genomic RNA
ccacctcccgagtcctcac

SEQ ID NO: 3809 - RNA, 22 nt, Homo sapiens
  source 1..22: mol_type = genomic RNA
tgagcccctgtgccgcccccag

SEQ ID NO: 3810 - RNA, 22 nt, Homo sapiens
  source 1..22: mol_type = genomic RNA
ctgggggcggcacaggggctca

SEQ ID NO: 3811 - RNA, 22 nt, Homo sapiens
  source 1..22: mol_type = genomic RNA
gtgggtacggcccagtgggggg

SEQ ID NO: 3812 - RNA, 22 nt, Homo sapiens
  source 1..22: mol_type = genomic RNA
ccccccactgggccgtacccac

SEQ ID NO: 3813 - RNA, 22 nt, Homo sapiens
  source 1..22: mol_type = genomic RNA
tcaccagccctgtgttccctag

SEQ ID NO: 3814 - RNA, 22 nt, Homo sapiens
  source 1..22: mol_type = genomic RNA
ctagggaacacagggctggtga

SEQ ID NO: 3815 - RNA, 26 nt, Homo sapiens
  source 1..26: mol_type = genomic RNA
gtgagggcatgcaggcctggatgggg

SEQ ID NO: 3816 - RNA, 26 nt, Homo sapiens
  source 1..26: mol_type = genomic RNA
ccccatccaggcctgcatgccctcac

SEQ ID NO: 3817 - RNA, 23 nt, Homo sapiens
  source 1..23: mol_type = genomic RNA
ctctcaccactgccctcccacag

SEQ ID NO: 3818 - RNA, 23 nt, Homo sapiens
  source 1..23: mol_type = genomic RNA
ctgtgggagggcagtggtgagag

SEQ ID NO: 3819 - RNA, 24 nt, Homo sapiens
  source 1..24: mol_type = genomic RNA
gtgggtagggtttgggggagagcg

SEQ ID NO: 3820 - RNA, 24 nt, Homo sapiens
  source 1..24: mol_type = genomic RNA
cgctctcccccaaaccctacccac

SEQ ID NO: 3821 - RNA, 20 nt, Homo sapiens
  source 1..20: mol_type = genomic RNA
gtgtctgggcggacagctgc

SEQ ID NO: 3822 - RNA, 20 nt, Homo sapiens
  source 1..20: mol_type = genomic RNA
gcagctgtccgcccagacac

SEQ ID NO: 3823 - RNA, 20 nt, Homo sapiens
  source 1..20: mol_type = genomic RNA
cttcctcgtctgtctgcccc

SEQ ID NO: 3824 - RNA, 20 nt, Homo sapiens
  source 1..20: mol_type = genomic RNA
ggggcagacagacgaggaag

SEQ ID NO: 3825 - RNA, 23 nt, Homo sapiens
  source 1..23: mol_type = genomic RNA
gtgagtgggagccccagtgtgtg

SEQ ID NO: 3826 - RNA, 23 nt, Homo sapiens
  source 1..23: mol_type = genomic RNA
cacacactggggctcccactcac

SEQ ID NO: 3827 - RNA, 27 nt, Homo sapiens
  source 1..27: mol_type = genomic RNA
accttcttgtataagcactgtgctaaa

SEQ ID NO: 3828 - RNA, 27 nt, Homo sapiens
  source 1..27: mol_type = genomic RNA
tttagcacagtgcttatacaagaaggt

SEQ ID NO: 3829 - RNA, 22 nt, Homo sapiens
  source 1..22: mol_type = genomic RNA
ggcgacaaaacgagaccctgtc

SEQ ID NO: 3830 - RNA, 22 nt, Homo sapiens
  source 1..22: mol_type = genomic RNA
gacagggtctcgttttgtcgcc

SEQ ID NO: 3831 - RNA, 22 nt, Homo sapiens
  source 1..22: mol_type = genomic RNA
ttgcttgaacccaggaagtgga

SEQ ID NO: 3832 - RNA, 22 nt, Homo sapiens
  source 1..22: mol_type = genomic RNA
tccacttcctgggttcaagcaa

SEQ ID NO: 3833 - RNA, 19 nt, Homo sapiens
  source 1..19: mol_type = genomic RNA
ggagatggaggttgcagtg

SEQ ID NO: 3834 - RNA, 19 nt, Homo sapiens
  source 1..19: mol_type = genomic RNA
cactgcaacctccatctcc

SEQ ID NO: 3835 - RNA, 21 nt, Homo sapiens
  source 1..21: mol_type = genomic RNA
accactgcactccagcctgag

SEQ ID NO: 3836 - RNA, 21 nt, Homo sapiens
  source 1..21: mol_type = genomic RNA
ctcaggctggagtgcagtggt

SEQ ID NO: 3837 - RNA, 22 nt, Homo sapiens
  source 1..22: mol_type = genomic RNA
ggtggttgaggctgcagtaagt

SEQ ID NO: 3838 - RNA, 22 nt, Homo sapiens
  source 1..22: mol_type = genomic RNA
acttactgcagcctcaaccacc

SEQ ID NO: 3839 - RNA, 17 nt, Homo sapiens
  source 1..17: mol_type = genomic RNA
tcgcctcctcctctccc

SEQ ID NO: 3840 - RNA, 17 nt, Homo sapiens
  source 1..17: mol_type = genomic RNA
gggagaggaggaggcga

SEQ ID NO: 3841 - RNA, 22 nt, Homo sapiens
  source 1..22: mol_type = genomic RNA
tctatacagaccctggcttttc

SEQ ID NO: 3842 - RNA, 22 nt, Homo sapiens
  source 1..22: mol_type = genomic RNA
gaaaagccagggtctgtataga

SEQ ID NO: 3843 - RNA, 22 nt, Homo sapiens
  source 1..22: mol_type = genomic RNA
tctgggcaacaaagtgagacct

SEQ ID NO: 3844 - RNA, 22 nt, Homo sapiens
  source 1..22: mol_type = genomic RNA
aggtctcactttgttgcccaga

SEQ ID NO: 3845 - RNA, 21 nt, Homo sapiens
  source 1..21: mol_type = genomic RNA
gatctcactttgttgcccagg

SEQ ID NO: 3846 - RNA, 21 nt, Homo sapiens
  source 1..21: mol_type = genomic RNA
cctgggcaacaaagtgagatc

SEQ ID NO: 3847 - RNA, 20 nt, Homo sapiens
  source 1..20: mol_type = genomic RNA
tcgcgccccggctcccgttc

SEQ ID NO: 3848 - RNA, 20 nt, Homo sapiens
  source 1..20: mol_type = genomic RNA
gaacgggagccggggcgcga

SEQ ID NO: 3849 - RNA, 25 nt, Homo sapiens
  source 1..25: mol_type = genomic RNA
tgggaacgggttccggcagacgctg

SEQ ID NO: 3850 - RNA, 25 nt, Homo sapiens
  source 1..25: mol_type = genomic RNA
cagcgtctgccggaacccgttccca

SEQ ID NO: 3851 - RNA, 21 nt, Homo sapiens
  source 1..21: mol_type = genomic RNA
ttaggccgcagatctgggtga

SEQ ID NO: 3852 - RNA, 21 nt, Homo sapiens
  source 1..21: mol_type = genomic RNA
tcacccagatctgcggcctaa

SEQ ID NO: 3853 - RNA, 22 nt, Homo sapiens
  source 1..22: mol_type = genomic RNA
aataggccacggatctgggcaa

SEQ ID NO: 3854 - RNA, 22 nt, Homo sapiens
  source 1..22: mol_type = genomic RNA
ttgcccagatccgtggcctatt

SEQ ID NO: 3855 - RNA, 21 nt, Homo sapiens
  source 1..21: mol_type = genomic RNA
cacccagatctgcggcctaat

SEQ ID NO: 3856 - RNA, 21 nt, Homo sapiens
  source 1..21: mol_type = genomic RNA
attaggccgcagatctgggtg

SEQ ID NO: 3857 - RNA, 22 nt, Homo sapiens
  source 1..22: mol_type = genomic RNA
ttagggccctggctccatctcc

SEQ ID NO: 3858 - RNA, 22 nt, Homo sapiens
  source 1..22: mol_type = genomic RNA
ggagatggagccagggccctaa

SEQ ID NO: 3859 - RNA, 22 nt, Homo sapiens
  source 1..22: mol_type = genomic RNA
ttcattcggctgtccagatgta

SEQ ID NO: 3860 - RNA, 22 nt, Homo sapiens
  source 1..22: mol_type = genomic RNA
tacatctggacagccgaatgaa

SEQ ID NO: 3861 - RNA, 24 nt, Homo sapiens
  source 1..24: mol_type = genomic RNA
ttgcagctgcctgggagtgacttc

SEQ ID NO: 3862 - RNA, 24 nt, Homo sapiens
  source 1..24: mol_type = genomic RNA
gaagtcactcccaggcagctgcaa

SEQ ID NO: 3863 - RNA, 21 nt, Homo sapiens
  source 1..21: mol_type = genomic RNA
ttgggacatacttatgctaaa

SEQ ID NO: 3864 - RNA, 21 nt, Homo sapiens
  source 1..21: mol_type = genomic RNA
tttagcataagtatgtcccaa

SEQ ID NO: 3865 - RNA, 22 nt, Homo sapiens
  source 1..22: mol_type = genomic RNA
tctcactgtagcctcgaacccc

SEQ ID NO: 3866 - RNA, 22 nt, Homo sapiens
  source 1..22: mol_type = genomic RNA
ggggttcgaggctacagtgaga

SEQ ID NO: 3867 - RNA, 22 nt, Homo sapiens
  source 1..22: mol_type = genomic RNA
tttgaggctacagtgagatgtg

SEQ ID NO: 3868 - RNA, 22 nt, Homo sapiens
  source 1..22: mol_type = genomic RNA
cacatctcactgtagcctcaaa

SEQ ID NO: 3869 - RNA, 18 nt, Homo sapiens
  source 1..18: mol_type = genomic RNA
cagggaggtgaatgtgat

SEQ ID NO: 3870 - RNA, 18 nt, Homo sapiens
  source 1..18: mol_type = genomic RNA
atcacattcacctccctg

SEQ ID NO: 3871 - RNA, 19 nt, Homo sapiens
  source 1..19: mol_type = genomic RNA
gatgatgctgctgatgctg

SEQ ID NO: 3872 - RNA, 19 nt, Homo sapiens
  source 1..19: mol_type = genomic RNA
cagcatcagcagcatcatc

SEQ ID NO: 3873 - RNA, 24 nt, Homo sapiens
  source 1..24: mol_type = genomic RNA
ccagacagaattctatgcactttc

SEQ ID NO: 3874 - RNA, 24 nt, Homo sapiens
  source 1..24: mol_type = genomic RNA
gaaagtgcatagaattctgtctgg

SEQ ID NO: 3875 - RNA, 22 nt, Homo sapiens
  source 1..22: mol_type = genomic RNA
ctcctggggcccgcactctcgc

SEQ ID NO: 3876 - RNA, 22 nt, Homo sapiens
  source 1..22: mol_type = genomic RNA
gcgagagtgcgggccccaggag

SEQ ID NO: 3877 - RNA, 21 nt, Homo sapiens
  source 1..21: mol_type = genomic RNA
ctccgtttgcctgtttcgctg

SEQ ID NO: 3878 - RNA, 21 nt, Homo sapiens
  source 1..21: mol_type = genomic RNA
cagcgaaacaggcaaacggag

SEQ ID NO: 3879 - RNA, 22 nt, Homo sapiens
  source 1..22: mol_type = genomic RNA
ctcggcgcggggcgcgggctcc

SEQ ID NO: 3880 - RNA, 22 nt, Homo sapiens
  source 1..22: mol_type = genomic RNA
ggagcccgcgccccgcgccgag

SEQ ID NO: 3881 - RNA, 21 nt, Homo sapiens
  source 1..21: mol_type = genomic RNA
gccctccgcccgtgcaccccg

SEQ ID NO: 3882 - RNA, 21 nt, Homo sapiens
  source 1..21: mol_type = genomic RNA
cggggtgcacgggcggagggc

SEQ ID NO: 3883 - RNA, 22 nt, Homo sapiens
  source 1..22: mol_type = genomic RNA
gcccgcgtgtggagccaggtgt

SEQ ID NO: 3884 - RNA, 22 nt, Homo sapiens
  source 1..22: mol_type = genomic RNA
acacctggctccacacgcgggc

SEQ ID NO: 3885 - RNA, 22 nt, Homo sapiens
  source 1..22: mol_type = genomic RNA
aaaaccgtctagttacagttgt

SEQ ID NO: 3886 - RNA, 22 nt, Homo sapiens
  source 1..22: mol_type = genomic RNA
acaactgtaactagacggtttt

SEQ ID NO: 3887 - RNA, 18 nt, Homo sapiens
  source 1..18: mol_type = genomic RNA
tccagtgccctcctctcc

SEQ ID NO: 3888 - RNA, 18 nt, Homo sapiens
  source 1..18: mol_type = genomic RNA
ggagaggagggcactgga

SEQ ID NO: 3889 - RNA, 18 nt, Homo sapiens
  source 1..18: mol_type = genomic RNA
tgaggcagtagattgaat

SEQ ID NO: 3890 - RNA, 18 nt, Homo sapiens
  source 1..18: mol_type = genomic RNA
attcaatctactgcctca

SEQ ID NO: 3891 - RNA, 22 nt, Homo sapiens
  source 1..22: mol_type = genomic RNA
aggggctggctttcctctggtc

SEQ ID NO: 3892 - RNA, 22 nt, Homo sapiens
  source 1..22: mol_type = genomic RNA
gaccagaggaaagccagcccct

SEQ ID NO: 3893 - RNA, 22 nt, Homo sapiens
  source 1..22: mol_type = genomic RNA
tggagagaaaggcagttcctga

SEQ ID NO: 3894 - RNA, 22 nt, Homo sapiens
  source 1..22: mol_type = genomic RNA
tcaggaactgcctttctctcca

SEQ ID NO: 3895 - RNA, 22 nt, Homo sapiens
  source 1..22: mol_type = genomic RNA
tcgtgtcttgtgttgcagccgg

SEQ ID NO: 3896 - RNA, 22 nt, Homo sapiens
  source 1..22: mol_type = genomic RNA
ccggctgcaacacaagacacga

SEQ ID NO: 3897 - RNA, 22 nt, Homo sapiens
  source 1..22: mol_type = genomic RNA
ggctacaacacaggacccgggc

SEQ ID NO: 3898 - RNA, 22 nt, Homo sapiens
  source 1..22: mol_type = genomic RNA
gcccgggtcctgtgttgtagcc

SEQ ID NO: 3899 - RNA, 21 nt, Homo sapiens
  source 1..21: mol_type = genomic RNA
cggcggggacggcgattggtc

SEQ ID NO: 3900 - RNA, 21 nt, Homo sapiens
  source 1..21: mol_type = genomic RNA
gaccaatcgccgtccccgccg

SEQ ID NO: 3901 - RNA, 22 nt, Homo sapiens
  source 1..22: mol_type = genomic RNA
cgcaggggccgggtgctcaccg

SEQ ID NO: 3902 - RNA, 22 nt, Homo sapiens
  source 1..22: mol_type = genomic RNA
cggtgagcacccggcccctgcg

SEQ ID NO: 3903 - RNA, 21 nt, Homo sapiens
  source 1..21: mol_type = genomic RNA
tgagtgccggtgcctgccctg

SEQ ID NO: 3904 - RNA, 21 nt, Homo sapiens
  source 1..21: mol_type = genomic RNA
cagggcaggcaccggcactca

SEQ ID NO: 3905 - RNA, 22 nt, Homo sapiens
  source 1..22: mol_type = genomic RNA
gctgcgcttggatttcgtcccc

SEQ ID NO: 3906 - RNA, 22 nt, Homo sapiens
  source 1..22: mol_type = genomic RNA
ggggacgaaatccaagcgcagc

SEQ ID NO: 3907 - RNA, 23 nt, Homo sapiens
  source 1..23: mol_type = genomic RNA
caacggaatcccaaaagcagctg

SEQ ID NO: 3908 - RNA, 23 nt, Homo sapiens
  source 1..23: mol_type = genomic RNA
cagctgcttttgggattccgttg

SEQ ID NO: 3909 - RNA, 22 nt, Homo sapiens
  source 1..22: mol_type = genomic RNA
tcaggccaggcacagtggctca

SEQ ID NO: 3910 - RNA, 22 nt, Homo sapiens
  source 1..22: mol_type = genomic RNA
tgagccactgtgcctggcctga

SEQ ID NO: 3911 - RNA, 19 nt, Homo sapiens
  source 1..19: mol_type = genomic RNA
accgtgcaaaggtagcata

SEQ ID NO: 3912 - RNA, 19 nt, Homo sapiens
  source 1..19: mol_type = genomic RNA
tatgctacctttgcacggt

SEQ ID NO: 3913 - RNA, 20 nt, Homo sapiens
  source 1..20: mol_type = genomic RNA
cctcctgccctccttgctgt

SEQ ID NO: 3914 - RNA, 20 nt, Homo sapiens
  source 1..20: mol_type = genomic RNA
acagcaaggagggcaggagg

SEQ ID NO: 3915 - RNA, 20 nt, Homo sapiens
  source 1..20: mol_type = genomic RNA
tgttttgataacagtaatgt

SEQ ID NO: 3916 - RNA, 20 nt, Homo sapiens
  source 1..20: mol_type = genomic RNA
acattactgttatcaaaaca

SEQ ID NO: 3917 - RNA, 23 nt, Homo sapiens
  source 1..23: mol_type = genomic RNA
gtgttaattaaacctctatttac

SEQ ID NO: 3918 - RNA, 23 nt, Homo sapiens
  source 1..23: mol_type = genomic RNA
gtaaatagaggtttaattaacac

SEQ ID NO: 3919 - RNA, 23 nt, Homo sapiens
  source 1..23: mol_type = genomic RNA
ctgtaatataaatttaatttatt

SEQ ID NO: 3920 - RNA, 23 nt, Homo sapiens
  source 1..23: mol_type = genomic RNA
aataaattaaatttatattacag

SEQ ID NO: 3921 - RNA, 22 nt, Homo sapiens
  source 1..22: mol_type = genomic RNA
ttggggaaacggccgctgagtg

SEQ ID NO: 3922 - RNA, 22 nt, Homo sapiens
  source 1..22: mol_type = genomic RNA
cactcagcggccgtttccccaa

SEQ ID NO: 3923 - RNA, 21 nt, Homo sapiens
  source 1..21: mol_type = genomic RNA
cctcccatgccaagaactccc

SEQ ID NO: 3924 - RNA, 21 nt, Homo sapiens
  source 1..21: mol_type = genomic RNA
gggagttcttggcatgggagg

SEQ ID NO: 3925 - RNA, 21 nt, Homo sapiens
  source 1..21: mol_type = genomic RNA
ggttcttagcataggaggtct

SEQ ID NO: 3926 - RNA, 21 nt, Homo sapiens
  source 1..21: mol_type = genomic RNA
agacctcctatgctaagaacc

SEQ ID NO: 3927 - RNA, 21 nt, Homo sapiens
  source 1..21: mol_type = genomic RNA
tgttctctttgccaaggacag

SEQ ID NO: 3928 - RNA, 21 nt, Homo sapiens
  source 1..21: mol_type = genomic RNA
ctgtccttggcaaagagaaca

SEQ ID NO: 3929 - RNA, 22 nt, Homo sapiens
  source 1..22: mol_type = genomic RNA
aaatctctgcaggcaaatgtga

SEQ ID NO: 3930 - RNA, 22 nt, Homo sapiens
  source 1..22: mol_type = genomic RNA
tcacatttgcctgcagagattt

SEQ ID NO: 3931 - RNA, 22 nt, Homo sapiens
  source 1..22: mol_type = genomic RNA
catggttctgtcaagcaccgcg

SEQ ID NO: 3932 - RNA, 22 nt, Homo sapiens
  source 1..22: mol_type = genomic RNA
cgcggtgcttgacagaaccatg

SEQ ID NO: 3933 - RNA, 21 nt, Homo sapiens
  source 1..21: mol_type = genomic RNA
ttgtgcttgatctaaccatgt

SEQ ID NO: 3934 - RNA, 21 nt, Homo sapiens
  source 1..21: mol_type = genomic RNA
acatggttagatcaagcacaa

SEQ ID NO: 3935 - RNA, 22 nt, Homo sapiens
  source 1..22: mol_type = genomic RNA
tctgcaagtgtcagaggcgagg

SEQ ID NO: 3936 - RNA, 22 nt, Homo sapiens
  source 1..22: mol_type = genomic RNA
cctcgcctctgacacttgcaga

SEQ ID NO: 3937 - RNA, 22 nt, Homo sapiens
  source 1..22: mol_type = genomic RNA
gagagcagtgtgtgttgcctgg

SEQ ID NO: 3938 - RNA, 22 nt, Homo sapiens
  source 1..22: mol_type = genomic RNA
ccaggcaacacacactgctctc

SEQ ID NO: 3939 - RNA, 22 nt, Homo sapiens
  source 1..22: mol_type = genomic RNA
atcacattgccagtgattaccc

SEQ ID NO: 3940 - RNA, 22 nt, Homo sapiens
  source 1..22: mol_type = genomic RNA
gggtaatcactggcaatgtgat

SEQ ID NO: 3941 - RNA, 22 nt, Homo sapiens
  source 1..22: mol_type = genomic RNA
agcagaggcagagaggctcagg

SEQ ID NO: 3942 - RNA, 22 nt, Homo sapiens
  source 1..22: mol_type = genomic RNA
cctgagcctctctgcctctgct

SEQ ID NO: 3943 - RNA, 23 nt, Homo sapiens
  source 1..23: mol_type = genomic RNA
tgaggctctgttagccttggctc

SEQ ID NO: 3944 - RNA, 23 nt, Homo sapiens
  source 1..23: mol_type = genomic RNA
gagccaaggctaacagagcctca

SEQ ID NO: 3945 - RNA, 22 nt, Homo sapiens
  source 1..22: mol_type = genomic RNA
tatcatggagttggtaaagcac

SEQ ID NO: 3946 - RNA, 22 nt, Homo sapiens
  source 1..22: mol_type = genomic RNA
gtgctttaccaactccatgata

SEQ ID NO: 3947 - RNA, 22 nt, Homo sapiens
  source 1..22: mol_type = genomic RNA
gttttaccacctccaggagact

SEQ ID NO: 3948 - RNA, 22 nt, Homo sapiens
  source 1..22: mol_type = genomic RNA
agtctcctggaggtggtaaaac

SEQ ID NO: 3949 - RNA, 22 nt, Homo sapiens
  source 1..22: mol_type = genomic RNA
cgcctcttcagcgctgtcttcc

SEQ ID NO: 3950 - RNA, 22 nt, Homo sapiens
  source 1..22: mol_type = genomic RNA
ggaagacagcgctgaagaggcg

SEQ ID NO: 3951 - RNA, 23 nt, Homo sapiens
  source 1..23: mol_type = genomic RNA
caggcagtgactgttcagacgtc

SEQ ID NO: 3952 - RNA, 23 nt, Homo sapiens
  source 1..23: mol_type = genomic RNA
gacgtctgaacagtcactgcctg

SEQ ID NO: 3953 - RNA, 23 nt, Homo sapiens
  source 1..23: mol_type = genomic RNA
agaattgcgtttggacaatcagt

SEQ ID NO: 3954 - RNA, 23 nt, Homo sapiens
  source 1..23: mol_type = genomic RNA
actgattgtccaaacgcaattct

SEQ ID NO: 3955 - RNA, 22 nt, Homo sapiens
  source 1..22: mol_type = genomic RNA
agatgtccagccacaattctcg

SEQ ID NO: 3956 - RNA, 22 nt, Homo sapiens
  source 1..22: mol_type = genomic RNA
cgagaattgtggctggacatct

SEQ ID NO: 3957 - RNA, 24 nt, Homo sapiens
  source 1..24: mol_type = genomic RNA
agcagaagcagggaggttctccca

SEQ ID NO: 3958 - RNA, 24 nt, Homo sapiens
  source 1..24: mol_type = genomic RNA
tgggagaacctccctgcttctgct

SEQ ID NO: 3959 - RNA, 22 nt, Homo sapiens
  source 1..22: mol_type = genomic RNA
tatgtgggatggtaaaccgctt

SEQ ID NO: 3960 - RNA, 22 nt, Homo sapiens
  source 1..22: mol_type = genomic RNA
aagcggtttaccatcccacata

SEQ ID NO: 3961 - RNA, 22 nt, Homo sapiens
  source 1..22: mol_type = genomic RNA
tggtttaccgtcccacatacat

SEQ ID NO: 3962 - RNA, 22 nt, Homo sapiens
  source 1..22: mol_type = genomic RNA
atgtatgtgggacggtaaacca

SEQ ID NO: 3963 - RNA, 23 nt, Homo sapiens
  source 1..23: mol_type = genomic RNA
cagtgcaatgatattgtcaaagc

SEQ ID NO: 3964 - RNA, 23 nt, Homo sapiens
  source 1..23: mol_type = genomic RNA
gctttgacaatatcattgcactg

SEQ ID NO: 3965 - RNA, 17 nt, Homo sapiens
  source 1..17: mol_type = genomic RNA
taattgcttccatgttt

SEQ ID NO: 3966 - RNA, 17 nt, Homo sapiens
  source 1..17: mol_type = genomic RNA
aaacatggaagcaatta

SEQ ID NO: 3967 - RNA, 23 nt, Homo sapiens
  source 1..23: mol_type = genomic RNA
ttgccacactgcaacaccttaca

SEQ ID NO: 3968 - RNA, 23 nt, Homo sapiens
  source 1..23: mol_type = genomic RNA
tgtaaggtgttgcagtgtggcaa

SEQ ID NO: 3969 - RNA, 21 nt, Homo sapiens
  source 1..21: mol_type = genomic RNA
tctggctgttgtggtgtgcaa

SEQ ID NO: 3970 - RNA, 21 nt, Homo sapiens
  source 1..21: mol_type = genomic RNA
ttgcacaccacaacagccaga

SEQ ID NO: 3971 - RNA, 22 nt, Homo sapiens
  source 1..22: mol_type = genomic RNA
gatatcagctcagtaggcaccg

SEQ ID NO: 3972 - RNA, 22 nt, Homo sapiens
  source 1..22: mol_type = genomic RNA
cggtgcctactgagctgatatc

SEQ ID NO: 3973 - RNA, 21 nt, Homo sapiens
  source 1..21: mol_type = genomic RNA
gttcctgctgaactgagccag

SEQ ID NO: 3974 - RNA, 21 nt, Homo sapiens
  source 1..21: mol_type = genomic RNA
ctggctcagttcagcaggaac

SEQ ID NO: 3975 - RNA, 20 nt, Homo sapiens
  source 1..20: mol_type = genomic RNA
atatgggtttactagttggt

SEQ ID NO: 3976 - RNA, 20 nt, Homo sapiens
  source 1..20: mol_type = genomic RNA
accaactagtaaacccatat

SEQ ID NO: 3977 - RNA, 22 nt, Homo sapiens
  source 1..22: mol_type = genomic RNA
tgctatgccaacatattgccat

SEQ ID NO: 3978 - RNA, 22 nt, Homo sapiens
  source 1..22: mol_type = genomic RNA
atggcaatatgttggcatagca

SEQ ID NO: 3979 - RNA, 21 nt, Homo sapiens
  source 1..21: mol_type = genomic RNA
aggcaagatgctggcatagct

SEQ ID NO: 3980 - RNA, 21 nt, Homo sapiens
  source 1..21: mol_type = genomic RNA
agctatgccagcatcttgcct

SEQ ID NO: 3981 - RNA, 18 nt, Homo sapiens
  source 1..18: mol_type = genomic RNA
cggggcggcaggggcctc

SEQ ID NO: 3982 - RNA, 18 nt, Homo sapiens
  source 1..18: mol_type = genomic RNA
gaggcccctgccgccccg

SEQ ID NO: 3983 - RNA, 19 nt, Homo sapiens
  source 1..19: mol_type = genomic RNA
aaaagctgggttgagagga

SEQ ID NO: 3984 - RNA, 19 nt, Homo sapiens
  source 1..19: mol_type = genomic RNA
tcctctcaacccagctttt

SEQ ID NO: 3985 - RNA, 22 nt, Homo sapiens
  source 1..22: mol_type = genomic RNA
cccaatacacggtcgacctctt

SEQ ID NO: 3986 - RNA, 22 nt, Homo sapiens
  source 1..22: mol_type = genomic RNA
aagaggtcgaccgtgtattggg

SEQ ID NO: 3987 - RNA, 23 nt, Homo sapiens
  source 1..23: mol_type = genomic RNA
aggttgtccgtggtgagttcgca

SEQ ID NO: 3988 - RNA, 23 nt, Homo sapiens
  source 1..23: mol_type = genomic RNA
tgcgaactcaccacggacaacct

SEQ ID NO: 3989 - RNA, 23 nt, Homo sapiens
  source 1..23: mol_type = genomic RNA
gcaaagcacacggcctgcagaga

SEQ ID NO: 3990 - RNA, 23 nt, Homo sapiens
  source 1..23: mol_type = genomic RNA
tctctgcaggccgtgtgctttgc

SEQ ID NO: 3991 - RNA, 22 nt, Homo sapiens
  source 1..22: mol_type = genomic RNA
tctctgggcctgtgtcttaggc

SEQ ID NO: 3992 - RNA, 22 nt, Homo sapiens
  source 1..22: mol_type = genomic RNA
gcctaagacacaggcccagaga

SEQ ID NO: 3993 - RNA, 21 nt, Homo sapiens
  source 1..21: mol_type = genomic RNA
gcccctgggcctatcctagaa

SEQ ID NO: 3994 - RNA, 21 nt, Homo sapiens
  source 1..21: mol_type = genomic RNA
ttctaggataggcccaggggc

SEQ ID NO: 3995 - RNA, 22 nt, Homo sapiens
  source 1..22: mol_type = genomic RNA
tccgtctcagttactttatagc

SEQ ID NO: 3996 - RNA, 22 nt, Homo sapiens
  source 1..22: mol_type = genomic RNA
gctataaagtaactgagacgga

SEQ ID NO: 3997 - RNA, 22 nt, Homo sapiens
  source 1..22: mol_type = genomic RNA
aacacacctattcaaggattca

SEQ ID NO: 3998 - RNA, 22 nt, Homo sapiens
  source 1..22: mol_type = genomic RNA
tgaatccttgaataggtgtgtt

SEQ ID NO: 3999 - RNA, 24 nt, Homo sapiens
  source 1..24: mol_type = genomic RNA
aatccttggaacctaggtgtgagt

SEQ ID NO: 4000 - RNA, 24 nt, Homo sapiens
  source 1..24: mol_type = genomic RNA
actcacacctaggttccaaggatt

SEQ ID NO: 4001 - RNA, 22 nt, Homo sapiens
  source 1..22: mol_type = genomic RNA
taatgcccctaaaaatccttat

SEQ ID NO: 4002 - RNA, 22 nt, Homo sapiens
  source 1..22: mol_type = genomic RNA
ataaggatttttaggggcatta

SEQ ID NO: 4003 - RNA, 23 nt, Homo sapiens
  source 1..23: mol_type = genomic RNA
agggacttttgggggcagatgtg

SEQ ID NO: 4004 - RNA, 23 nt, Homo sapiens
  source 1..23: mol_type = genomic RNA
cacatctgcccccaaaagtccct

SEQ ID NO: 4005 - RNA, 22 nt, Homo sapiens
  source 1..22: mol_type = genomic RNA
taatgcccctaaaaatccttat

SEQ ID NO: 4006 - RNA, 22 nt, Homo sapiens
  source 1..22: mol_type = genomic RNA
ataaggatttttaggggcatta

SEQ ID NO: 4007 - RNA, 22 nt, Homo sapiens
  source 1..22: mol_type = genomic RNA
agggactttcaggggcagctgt

SEQ ID NO: 4008 - RNA, 22 nt, Homo sapiens
  source 1..22: mol_type = genomic RNA
acagctgcccctgaaagtccct

SEQ ID NO: 4009 - RNA, 24 nt, Homo sapiens
  source 1..24: mol_type = genomic RNA
gaaaatgatgagtagtgactgatg

SEQ ID NO: 4010 - RNA, 24 nt, Homo sapiens
  source 1..24: mol_type = genomic RNA
catcagtcactactcatcattttc

SEQ ID NO: 4011 - RNA, 23 nt, Homo sapiens
  source 1..23: mol_type = genomic RNA
tgagcaccacacaggccgggcgc

SEQ ID NO: 4012 - RNA, 23 nt, Homo sapiens
  source 1..23: mol_type = genomic RNA
gcgcccggcctgtgtggtgctca

SEQ ID NO: 4013 - RNA, 21 nt, Homo sapiens
  source 1..21: mol_type = genomic RNA
gctggtctgcgtggtgctcgg

SEQ ID NO: 4014 - RNA, 21 nt, Homo sapiens
  source 1..21: mol_type = genomic RNA
ccgagcaccacgcagaccagc

SEQ ID NO: 4015 - RNA, 22 nt, Homo sapiens
  source 1..22: mol_type = genomic RNA
gcctgctggggtggaacctggt

SEQ ID NO: 4016 - RNA, 22 nt, Homo sapiens
  source 1..22: mol_type = genomic RNA
accaggttccaccccagcaggc

SEQ ID NO: 4017 - RNA, 23 nt, Homo sapiens
  source 1..23: mol_type = genomic RNA
gaagtgcttcgattttggggtgt

SEQ ID NO: 4018 - RNA, 23 nt, Homo sapiens
  source 1..23: mol_type = genomic RNA
acaccccaaaatcgaagcacttc

SEQ ID NO: 4019 - RNA, 22 nt, Homo sapiens
  source 1..22: mol_type = genomic RNA
actcaaaatgggggcgctttcc

SEQ ID NO: 4020 - RNA, 22 nt, Homo sapiens
  source 1..22: mol_type = genomic RNA
ggaaagcgcccccattttgagt

SEQ ID NO: 4021 - RNA, 22 nt, Homo sapiens
  source 1..22: mol_type = genomic RNA
tatgtaacatggtccactaact

SEQ ID NO: 4022 - RNA, 22 nt, Homo sapiens
  source 1..22: mol_type = genomic RNA
agttagtggaccatgttacata

SEQ ID NO: 4023 - RNA, 21 nt, Homo sapiens
  source 1..21: mol_type = genomic RNA
tggtagactatggaacgtagg

SEQ ID NO: 4024 - RNA, 21 nt, Homo sapiens
  source 1..21: mol_type = genomic RNA
cctacgttccatagtctacca

SEQ ID NO: 4025 - RNA, 22 nt, Homo sapiens
  source 1..22: mol_type = genomic RNA
tgtagatacgagcaccagccac

SEQ ID NO: 4026 - RNA, 22 nt, Homo sapiens
  source 1..22: mol_type = genomic RNA
gtggctggtgctcgtatctaca

SEQ ID NO: 4027 - RNA, 23 nt, Homo sapiens
  source 1..23: mol_type = genomic RNA
acaggcggctgtagcaatggggg

SEQ ID NO: 4028 - RNA, 23 nt, Homo sapiens
  source 1..23: mol_type = genomic RNA
cccccattgctacagccgcctgt

SEQ ID NO: 4029 - RNA, 22 nt, Homo sapiens
  source 1..22: mol_type = genomic RNA
aattcccttgtagataacccgg

SEQ ID NO: 4030 - RNA, 22 nt, Homo sapiens
  source 1..22: mol_type = genomic RNA
ccgggttatctacaagggaatt

SEQ ID NO: 4031 - RNA, 22 nt, Homo sapiens
  source 1..22: mol_type = genomic RNA
tacgcgcagaccacaggatgtc

SEQ ID NO: 4032 - RNA, 22 nt, Homo sapiens
  source 1..22: mol_type = genomic RNA
gacatcctgtggtctgcgcgta

SEQ ID NO: 4033 - RNA, 22 nt, Homo sapiens
  source 1..22: mol_type = genomic RNA
ttacacacaactgaggatcata

SEQ ID NO: 4034 - RNA, 22 nt, Homo sapiens
  source 1..22: mol_type = genomic RNA
tatgatcctcagttgtgtgtaa

SEQ ID NO: 4035 - RNA, 23 nt, Homo sapiens
  source 1..23: mol_type = genomic RNA
tagcccccaggcttcacttggcg

SEQ ID NO: 4036 - RNA, 23 nt, Homo sapiens
  source 1..23: mol_type = genomic RNA
cgccaagtgaagcctgggggcta

SEQ ID NO: 4037 - RNA, 23 nt, Homo sapiens
  source 1..23: mol_type = genomic RNA
agggcataggagagggttgatat

SEQ ID NO: 4038 - RNA, 23 nt, Homo sapiens
  source 1..23: mol_type = genomic RNA
atatcaaccctctcctatgccct

SEQ ID NO: 4039 - RNA, 22 nt, Homo sapiens
  source 1..22: mol_type = genomic RNA
gaatgttgctcggtgaacccct

SEQ ID NO: 4040 - RNA, 22 nt, Homo sapiens
  source 1..22: mol_type = genomic RNA
aggggttcaccgagcaacattc

SEQ ID NO: 4041 - RNA, 23 nt, Homo sapiens
  source 1..23: mol_type = genomic RNA
aggttacccgagcaactttgcat

SEQ ID NO: 4042 - RNA, 23 nt, Homo sapiens
  source 1..23: mol_type = genomic RNA
atgcaaagttgctcgggtaacct

SEQ ID NO: 4043 - RNA, 22 nt, Homo sapiens
  source 1..22: mol_type = genomic RNA
tatgtaacacggtccactaacc

SEQ ID NO: 4044 - RNA, 22 nt, Homo sapiens
  source 1..22: mol_type = genomic RNA
ggttagtggaccgtgttacata

SEQ ID NO: 4045 - RNA, 21 nt, Homo sapiens
  source 1..21: mol_type = genomic RNA
tagtagaccgtatagcgtacg

SEQ ID NO: 4046 - RNA, 21 nt, Homo sapiens
  source 1..21: mol_type = genomic RNA
cgtacgctatacggtctacta

SEQ ID NO: 4047 - RNA, 23 nt, Homo sapiens
  source 1..23: mol_type = genomic RNA
acttcacctggtccactagccgt

SEQ ID NO: 4048 - RNA, 23 nt, Homo sapiens
  source 1..23: mol_type = genomic RNA
acggctagtggaccaggtgaagt

SEQ ID NO: 4049 - RNA, 18 nt, Homo sapiens
  source 1..18: mol_type = genomic RNA
gtgttctctgatggacag

SEQ ID NO: 4050 - RNA, 18 nt, Homo sapiens
  source 1..18: mol_type = genomic RNA
ctgtccatcagagaacac

SEQ ID NO: 4051 - RNA, 22 nt, Homo sapiens
  source 1..22: mol_type = genomic RNA
caggtcgtcttgcagggcttct

SEQ ID NO: 4052 - RNA, 22 nt, Homo sapiens
  source 1..22: mol_type = genomic RNA
agaagccctgcaagacgacctg

SEQ ID NO: 4053 - RNA, 21 nt, Homo sapiens
  source 1..21: mol_type = genomic RNA
tgtcttgcaggccgtcatgca

SEQ ID NO: 4054 - RNA, 21 nt, Homo sapiens
  source 1..21: mol_type = genomic RNA
tgcatgacggcctgcaagaca

SEQ ID NO: 4055 - RNA, 22 nt, Homo sapiens
  source 1..22: mol_type = genomic RNA
atcatgatgggctcctcggtgt

SEQ ID NO: 4056 - RNA, 22 nt, Homo sapiens
  source 1..22: mol_type = genomic RNA
acaccgaggagcccatcatgat

SEQ ID NO: 4057 - RNA, 23 nt, Homo sapiens
  source 1..23: mol_type = genomic RNA
ttgctagttgcactcctctctgt

SEQ ID NO: 4058 - RNA, 23 nt, Homo sapiens
  source 1..23: mol_type = genomic RNA
acagagaggagtgcaactagcaa

SEQ ID NO: 4059 - RNA, 25 nt, Homo sapiens
  source 1..25: mol_type = genomic RNA
taggcagtgtattgctagcggctgt

SEQ ID NO: 4060 - RNA, 25 nt, Homo sapiens
  source 1..25: mol_type = genomic RNA
acagccgctagcaatacactgccta

SEQ ID NO: 4061 - RNA, 22 nt, Homo sapiens
  source 1..22: mol_type = genomic RNA
attggggacattttgcattcat

SEQ ID NO: 4062 - RNA, 22 nt, Homo sapiens
  source 1..22: mol_type = genomic RNA
atgaatgcaaaatgtccccaat

SEQ ID NO: 4063 - RNA, 22 nt, Homo sapiens
  source 1..22: mol_type = genomic RNA
ttttgcgatgtgttcctaatat

SEQ ID NO: 4064 - RNA, 22 nt, Homo sapiens
  source 1..22: mol_type = genomic RNA
atattaggaacacatcgcaaaa

SEQ ID NO: 4065 - RNA, 22 nt, Homo sapiens
  source 1..22: mol_type = genomic RNA
ttgggatcattttgcatccata

SEQ ID NO: 4066 - RNA, 22 nt, Homo sapiens
  source 1..22: mol_type = genomic RNA
tatggatgcaaaatgatcccaa

SEQ ID NO: 4067 - RNA, 22 nt, Homo sapiens
  source 1..22: mol_type = genomic RNA
ttttgcaatatgttcctgaata

SEQ ID NO: 4068 - RNA, 22 nt, Homo sapiens
  source 1..22: mol_type = genomic RNA
tattcaggaacatattgcaaaa

SEQ ID NO: 4069 - RNA, 21 nt, Homo sapiens
  source 1..21: mol_type = genomic RNA
gcagtccatgggcatatacac

SEQ ID NO: 4070 - RNA, 21 nt, Homo sapiens
  source 1..21: mol_type = genomic RNA
gtgtatatgcccatggactgc

SEQ ID NO: 4071 - RNA, 22 nt, Homo sapiens
  source 1..22: mol_type = genomic RNA
tatgtgcctttggactacatcg

SEQ ID NO: 4072 - RNA, 22 nt, Homo sapiens
  source 1..22: mol_type = genomic RNA
cgatgtagtccaaaggcacata

SEQ ID NO: 4073 - RNA, 23 nt, Homo sapiens
  source 1..23: mol_type = genomic RNA
atacacatacacgcaacacacat

SEQ ID NO: 4074 - RNA, 23 nt, Homo sapiens
  source 1..23: mol_type = genomic RNA
atgtgtgttgcgtgtatgtgtat

SEQ ID NO: 4075 - RNA, 23 nt, Homo sapiens
  source 1..23: mol_type = genomic RNA
ttgcatgtcagattgtaattccc

SEQ ID NO: 4076 - RNA, 23 nt, Homo sapiens
  source 1..23: mol_type = genomic RNA
gggaattacaatctgacatgcaa

SEQ ID NO: 4077 - RNA, 21 nt, Homo sapiens
  source 1..21: mol_type = genomic RNA
tcactcctctcctcccgtctt

SEQ ID NO: 4078 - RNA, 21 nt, Homo sapiens
  source 1..21: mol_type = genomic RNA
aagacgggaggagaggagtga

SEQ ID NO: 4079 - RNA, 22 nt, Homo sapiens
  source 1..22: mol_type = genomic RNA
tcaggctcagtcccctcccgat

SEQ ID NO: 4080 - RNA, 22 nt, Homo sapiens
  source 1..22: mol_type = genomic RNA
atcgggaggggactgagcctga

SEQ ID NO: 4081 - RNA, 22 nt, Homo sapiens
  source 1..22: mol_type = genomic RNA
gtcatacacggctctcctctct

SEQ ID NO: 4082 - RNA, 22 nt, Homo sapiens
  source 1..22: mol_type = genomic RNA
agagaggagagccgtgtatgac

SEQ ID NO: 4083 - RNA, 22 nt, Homo sapiens
  source 1..22: mol_type = genomic RNA
agaggctggccgtgatgaattc

SEQ ID NO: 4084 - RNA, 22 nt, Homo sapiens
  source 1..22: mol_type = genomic RNA
gaattcatcacggccagcctct

SEQ ID NO: 4085 - RNA, 22 nt, Homo sapiens
  source 1..22: mol_type = genomic RNA
aatcatacagggacatccagtt

SEQ ID NO: 4086 - RNA, 22 nt, Homo sapiens
  source 1..22: mol_type = genomic RNA
aactggatgtccctgtatgatt

SEQ ID NO: 4087 - RNA, 22 nt, Homo sapiens
  source 1..22: mol_type = genomic RNA
aatcgtacagggtcatccactt

SEQ ID NO: 4088 - RNA, 22 nt, Homo sapiens
  source 1..22: mol_type = genomic RNA
aagtggatgaccctgtacgatt

SEQ ID NO: 4089 - RNA, 21 nt, Homo sapiens
  source 1..21: mol_type = genomic RNA
ttgaaaggctatttcttggtc

SEQ ID NO: 4090 - RNA, 21 nt, Homo sapiens
  source 1..21: mol_type = genomic RNA
gaccaagaaatagcctttcaa

SEQ ID NO: 4091 - RNA, 21 nt, Homo sapiens
  source 1..21: mol_type = genomic RNA
cccagataatggcactctcaa

SEQ ID NO: 4092 - RNA, 21 nt, Homo sapiens
  source 1..21: mol_type = genomic RNA
ttgagagtgccattatctggg

SEQ ID NO: 4093 - RNA, 22 nt, Homo sapiens
  source 1..22: mol_type = genomic RNA
caacctggaggactccatgctg

SEQ ID NO: 4094 - RNA, 22 nt, Homo sapiens
  source 1..22: mol_type = genomic RNA
cagcatggagtcctccaggttg

SEQ ID NO: 4095 - RNA, 20 nt, Homo sapiens
  source 1..20: mol_type = genomic RNA
ccatggatctccaggtgggt

SEQ ID NO: 4096 - RNA, 20 nt, Homo sapiens
  source 1..20: mol_type = genomic RNA
acccacctggagatccatgg

SEQ ID NO: 4097 - RNA, 22 nt, Homo sapiens
  source 1..22: mol_type = genomic RNA
cttatgcaagattcccttctac

SEQ ID NO: 4098 - RNA, 22 nt, Homo sapiens
  source 1..22: mol_type = genomic RNA
gtagaagggaatcttgcataag

SEQ ID NO: 4099 - RNA, 22 nt, Homo sapiens
  source 1..22: mol_type = genomic RNA
agtggggaacccttccatgagg

SEQ ID NO: 4100 - RNA, 22 nt, Homo sapiens
  source 1..22: mol_type = genomic RNA
cctcatggaagggttccccact

SEQ ID NO: 4101 - RNA, 23 nt, Homo sapiens
  source 1..23: mol_type = genomic RNA
aggacctgcgggacaagattctt

SEQ ID NO: 4102 - RNA, 23 nt, Homo sapiens
  source 1..23: mol_type = genomic RNA
aagaatcttgtcccgcaggtcct

SEQ ID NO: 4103 - RNA, 22 nt, Homo sapiens
  source 1..22: mol_type = genomic RNA
caaaccacactgtggtgttaga

SEQ ID NO: 4104 - RNA, 22 nt, Homo sapiens
  source 1..22: mol_type = genomic RNA
tctaacaccacagtgtggtttg

SEQ ID NO: 4105 - RNA, 21 nt, Homo sapiens
  source 1..21: mol_type = genomic RNA
cagcagcacactgtggtttgt

SEQ ID NO: 4106 - RNA, 21 nt, Homo sapiens
  source 1..21: mol_type = genomic RNA
acaaaccacagtgtgctgctg

SEQ ID NO: 4107 - RNA, 23 nt, Homo sapiens
  source 1..23: mol_type = genomic RNA
tttcaagccagggggcgtttttc

SEQ ID NO: 4108 - RNA, 23 nt, Homo sapiens
  source 1..23: mol_type = genomic RNA
gaaaaacgccccctggcttgaaa

SEQ ID NO: 4109 - RNA, 20 nt, Homo sapiens
  source 1..20: mol_type = genomic RNA
tcactacctgacaatacagt

SEQ ID NO: 4110 - RNA, 20 nt, Homo sapiens
  source 1..20: mol_type = genomic RNA
actgtattgtcaggtagtga

SEQ ID NO: 4111 - RNA, 21 nt, Homo sapiens
  source 1..21: mol_type = genomic RNA
tgctgtattgtcaggtagtga

SEQ ID NO: 4112 - RNA, 21 nt, Homo sapiens
  source 1..21: mol_type = genomic RNA
tcactacctgacaatacagca

SEQ ID NO: 4113 - RNA, 22 nt, Homo sapiens
  source 1..22: mol_type = genomic RNA
ttctgcctctgtccaggtcctt

SEQ ID NO: 4114 - RNA, 22 nt, Homo sapiens
  source 1..22: mol_type = genomic RNA
aaggacctggacagaggcagaa

SEQ ID NO: 4115 - RNA, 24 nt, Homo sapiens
  source 1..24: mol_type = genomic RNA
agggctggactcagcggcggagct

SEQ ID NO: 4116 - RNA, 24 nt, Homo sapiens
  source 1..24: mol_type = genomic RNA
agctccgccgctgagtccagccct

SEQ ID NO: 4117 - RNA, 21 nt, Homo sapiens
  source 1..21: mol_type = genomic RNA
tgactgcctcactgaccactt

SEQ ID NO: 4118 - RNA, 21 nt, Homo sapiens
  source 1..21: mol_type = genomic RNA
aagtggtcagtgaggcagtca

SEQ ID NO: 4119 - RNA, 24 nt, Homo sapiens
  source 1..24: mol_type = genomic RNA
aatttggtttctgaggcacttagt

SEQ ID NO: 4120 - RNA, 24 nt, Homo sapiens
  source 1..24: mol_type = genomic RNA
actaagtgcctcagaaaccaaatt

SEQ ID NO: 4121 - RNA, 21 nt, Homo sapiens
  source 1..21: mol_type = genomic RNA
tacttttctaggttgttgggg

SEQ ID NO: 4122 - RNA, 21 nt, Homo sapiens
  source 1..21: mol_type = genomic RNA
ccccaacaacctagaaaagta

SEQ ID NO: 4123 - RNA, 23 nt, Homo sapiens
  source 1..23: mol_type = genomic RNA
tcacaacaaccttgcagggtaga

SEQ ID NO: 4124 - RNA, 23 nt, Homo sapiens
  source 1..23: mol_type = genomic RNA
tctaccctgcaaggttgttgtga

SEQ ID NO: 4125 - RNA, 22 nt, Homo sapiens
  source 1..22: mol_type = genomic RNA
cttggattttcctgggcctcag

SEQ ID NO: 4126 - RNA, 22 nt, Homo sapiens
  source 1..22: mol_type = genomic RNA
ctgaggcccaggaaaatccaag

SEQ ID NO: 4127 - RNA, 22 nt, Homo sapiens
  source 1..22: mol_type = genomic RNA
tgaggacagggcaaattcacga

SEQ ID NO: 4128 - RNA, 22 nt, Homo sapiens
  source 1..22: mol_type = genomic RNA
tcgtgaatttgccctgtcctca

SEQ ID NO: 4129 - RNA, 22 nt, Homo sapiens
  source 1..22: mol_type = genomic RNA
atcatatgaaccaaactctaat

SEQ ID NO: 4130 - RNA, 22 nt, Homo sapiens
  source 1..22: mol_type = genomic RNA
attagagtttggttcatatgat

SEQ ID NO: 4131 - RNA, 22 nt, Homo sapiens
  source 1..22: mol_type = genomic RNA
tagagtctggctgatatggttt

SEQ ID NO: 4132 - RNA, 22 nt, Homo sapiens
  source 1..22: mol_type = genomic RNA
aaaccatatcagccagactcta

SEQ ID NO: 4133 - RNA, 21 nt, Homo sapiens
  source 1..21: mol_type = genomic RNA
cctgtgctcccagggcctcgc

SEQ ID NO: 4134 - RNA, 21 nt, Homo sapiens
  source 1..21: mol_type = genomic RNA
gcgaggccctgggagcacagg

SEQ ID NO: 4135 - RNA, 22 nt, Homo sapiens
  source 1..22: mol_type = genomic RNA
tgaggcccttggggcacagtgg

SEQ ID NO: 4136 - RNA, 22 nt, Homo sapiens
  source 1..22: mol_type = genomic RNA
ccactgtgccccaagggcctca

SEQ ID NO: 4137 - RNA, 22 nt, Homo sapiens
  source 1..22: mol_type = genomic RNA
tcctaaatctgaaagtccaaaa

SEQ ID NO: 4138 - RNA, 22 nt, Homo sapiens
  source 1..22: mol_type = genomic RNA
ttttggactttcagatttagga

SEQ ID NO: 4139 - RNA, 24 nt, Homo sapiens
  source 1..24: mol_type = genomic RNA
ttggactttttcagatttggggat

SEQ ID NO: 4140 - RNA, 24 nt, Homo sapiens
  source 1..24: mol_type = genomic RNA
atccccaaatctgaaaaagtccaa

SEQ ID NO: 4141 - RNA, 22 nt, Homo sapiens
  source 1..22: mol_type = genomic RNA
atgcacctgggcaaggattctg

SEQ ID NO: 4142 - RNA, 22 nt, Homo sapiens
  source 1..22: mol_type = genomic RNA
cagaatccttgcccaggtgcat

SEQ ID NO: 4143 - RNA, 23 nt, Homo sapiens
  source 1..23: mol_type = genomic RNA
taatccttgctacctgggtgaga

SEQ ID NO: 4144 - RNA, 23 nt, Homo sapiens
  source 1..23: mol_type = genomic RNA
tctcacccaggtagcaaggatta

SEQ ID NO: 4145 - RNA, 22 nt, Homo sapiens
  source 1..22: mol_type = genomic RNA
ttttgtgtctcccattccccag

SEQ ID NO: 4146 - RNA, 22 nt, Homo sapiens
  source 1..22: mol_type = genomic RNA
ctggggaatgggagacacaaaa

SEQ ID NO: 4147 - RNA, 22 nt, Homo sapiens
  source 1..22: mol_type = genomic RNA
agggggatggcagagcaaaatt

SEQ ID NO: 4148 - RNA, 22 nt, Homo sapiens
  source 1..22: mol_type = genomic RNA
aattttgctctgccatccccct

SEQ ID NO: 4149 - RNA, 22 nt, Homo sapiens
  source 1..22: mol_type = genomic RNA
gtgcatggctgtatatataaca

SEQ ID NO: 4150 - RNA, 22 nt, Homo sapiens
  source 1..22: mol_type = genomic RNA
tgttatatatacagccatgcac

SEQ ID NO: 4151 - RNA, 21 nt, Homo sapiens
  source 1..21: mol_type = genomic RNA
tatatatacagccatgcactc

SEQ ID NO: 4152 - RNA, 21 nt, Homo sapiens
  source 1..21: mol_type = genomic RNA
gagtgcatggctgtatatata

SEQ ID NO: 4153 - RNA, 22 nt, Homo sapiens
  source 1..22: mol_type = genomic RNA
aatgcacccgggcaaggattct

SEQ ID NO: 4154 - RNA, 22 nt, Homo sapiens
  source 1..22: mol_type = genomic RNA
agaatccttgcccgggtgcatt

SEQ ID NO: 4155 - RNA, 22 nt, Homo sapiens
  source 1..22: mol_type = genomic RNA
aatcctttgtccctgggtgaga

SEQ ID NO: 4156 - RNA, 22 nt, Homo sapiens
  source 1..22: mol_type = genomic RNA
tctcacccagggacaaaggatt

SEQ ID NO: 4157 - RNA, 22 nt, Homo sapiens
  source 1..22: mol_type = genomic RNA
aatgcacctgggcaaggattca

SEQ ID NO: 4158 - RNA, 22 nt, Homo sapiens
  source 1..22: mol_type = genomic RNA
tgaatccttgcccaggtgcatt

SEQ ID NO: 4159 - RNA, 21 nt, Homo sapiens
  source 1..21: mol_type = genomic RNA
atccttgctatctgggtgcta

SEQ ID NO: 4160 - RNA, 21 nt, Homo sapiens
  source 1..21: mol_type = genomic RNA
tagcacccagatagcaaggat

SEQ ID NO: 4161 - RNA, 22 nt, Homo sapiens
  source 1..22: mol_type = genomic RNA
agaccctggtctgcactctatc

SEQ ID NO: 4162 - RNA, 22 nt, Homo sapiens
  source 1..22: mol_type = genomic RNA
gatagagtgcagaccagggtct

SEQ ID NO: 4163 - RNA, 21 nt, Homo sapiens
  source 1..21: mol_type = genomic RNA
ttgcagctgcggttgtaaggt

SEQ ID NO: 4164 - RNA, 21 nt, Homo sapiens
  source 1..21: mol_type = genomic RNA
accttacaaccgcagctgcaa

SEQ ID NO: 4165 - RNA, 22 nt, Homo sapiens
  source 1..22: mol_type = genomic RNA
cgtcaacacttgctggtttcct

SEQ ID NO: 4166 - RNA, 22 nt, Homo sapiens
  source 1..22: mol_type = genomic RNA
aggaaaccagcaagtgttgacg

SEQ ID NO: 4167 - RNA, 22 nt, Homo sapiens
  source 1..22: mol_type = genomic RNA
gggagccaggaagtattgatgt

SEQ ID NO: 4168 - RNA, 22 nt, Homo sapiens
  source 1..22: mol_type = genomic RNA
acatcaatacttcctggctccc

SEQ ID NO: 4169 - RNA, 21 nt, Homo sapiens
  source 1..21: mol_type = genomic RNA
taaggcacccttctgagtaga

SEQ ID NO: 4170 - RNA, 21 nt, Homo sapiens
  source 1..21: mol_type = genomic RNA
tctactcagaagggtgcctta

SEQ ID NO: 4171 - RNA, 22 nt, Homo sapiens
  source 1..22: mol_type = genomic RNA
tattcaggaaggtgttacttaa

SEQ ID NO: 4172 - RNA, 22 nt, Homo sapiens
  source 1..22: mol_type = genomic RNA
ttaagtaacaccttcctgaata

SEQ ID NO: 4173 - RNA, 21 nt, Homo sapiens
  source 1..21: mol_type = genomic RNA
ttttgcaccttttggagtgaa

SEQ ID NO: 4174 - RNA, 21 nt, Homo sapiens
  source 1..21: mol_type = genomic RNA
ttcactccaaaaggtgcaaaa

SEQ ID NO: 4175 - RNA, 23 nt, Homo sapiens
  source 1..23: mol_type = genomic RNA
tgattgtagccttttggagtaga

SEQ ID NO: 4176 - RNA, 23 nt, Homo sapiens
  source 1..23: mol_type = genomic RNA
tctactccaaaaggctacaatca

SEQ ID NO: 4177 - RNA, 23 nt, Homo sapiens
  source 1..23: mol_type = genomic RNA
gggtttgtagctttgctggcatg

SEQ ID NO: 4178 - RNA, 23 nt, Homo sapiens
  source 1..23: mol_type = genomic RNA
catgccagcaaagctacaaaccc

SEQ ID NO: 4179 - RNA, 23 nt, Homo sapiens
  source 1..23: mol_type = genomic RNA
cagggctcagggattggatggag

SEQ ID NO: 4180 - RNA, 23 nt, Homo sapiens
  source 1..23: mol_type = genomic RNA
ctccatccaatccctgagccctg

SEQ ID NO: 4181 - RNA, 23 nt, Homo sapiens
  source 1..23: mol_type = genomic RNA
atgctactcggaaatcccactga

SEQ ID NO: 4182 - RNA, 23 nt, Homo sapiens
  source 1..23: mol_type = genomic RNA
tcagtgggatttccgagtagcat

SEQ ID NO: 4183 - RNA, 21 nt, Homo sapiens
  source 1..21: mol_type = genomic RNA
gtgggatttctgagtagcatc

SEQ ID NO: 4184 - RNA, 21 nt, Homo sapiens
  source 1..21: mol_type = genomic RNA
gatgctactcagaaatcccac

SEQ ID NO: 4185 - RNA, 23 nt, Homo sapiens
  source 1..23: mol_type = genomic RNA
ccggggcagattggtgtagggtg

SEQ ID NO: 4186 - RNA, 23 nt, Homo sapiens
  source 1..23: mol_type = genomic RNA
caccctacaccaatctgccccgg

SEQ ID NO: 4187 - RNA, 23 nt, Homo sapiens
  source 1..23: mol_type = genomic RNA
acggagacgacaagactgtgctg

SEQ ID NO: 4188 - RNA, 23 nt, Homo sapiens
  source 1..23: mol_type = genomic RNA
cagcacagtcttgtcgtctccgt

SEQ ID NO: 4189 - RNA, 22 nt, Homo sapiens
  source 1..22: mol_type = genomic RNA
aatccacgctgagcttggcatc

SEQ ID NO: 4190 - RNA, 22 nt, Homo sapiens
  source 1..22: mol_type = genomic RNA
gatgccaagctcagcgtggatt

SEQ ID NO: 4191 - RNA, 23 nt, Homo sapiens
  source 1..23: mol_type = genomic RNA
aggaaatgaggctggctaggagc

SEQ ID NO: 4192 - RNA, 23 nt, Homo sapiens
  source 1..23: mol_type = genomic RNA
gctcctagccagcctcatttcct

SEQ ID NO: 4193 - RNA, 22 nt, Homo sapiens
  source 1..22: mol_type = genomic RNA
tgattggtacgtctgtgggtag

SEQ ID NO: 4194 - RNA, 22 nt, Homo sapiens
  source 1..22: mol_type = genomic RNA
ctacccacagacgtaccaatca

SEQ ID NO: 4195 - RNA, 22 nt, Homo sapiens
  source 1..22: mol_type = genomic RNA
aatcagtgaatgccttgaacct

SEQ ID NO: 4196 - RNA, 22 nt, Homo sapiens
  source 1..22: mol_type = genomic RNA
aggttcaaggcattcactgatt

SEQ ID NO: 4197 - RNA, 21 nt, Homo sapiens
  source 1..21: mol_type = genomic RNA
ttacaggcgtgaaccaccgcg

SEQ ID NO: 4198 - RNA, 21 nt, Homo sapiens
  source 1..21: mol_type = genomic RNA
cgcggtggttcacgcctgtaa

SEQ ID NO: 4199 - RNA, 21 nt, Homo sapiens
  source 1..21: mol_type = genomic RNA
tactgcagacagtggcaatca

SEQ ID NO: 4200 - RNA, 21 nt, Homo sapiens
  source 1..21: mol_type = genomic RNA
tgattgccactgtctgcagta

SEQ ID NO: 4201 - RNA, 21 nt, Homo sapiens
  source 1..21: mol_type = genomic RNA
gtttcaccatgttggtcaggc

SEQ ID NO: 4202 - RNA, 21 nt, Homo sapiens
  source 1..21: mol_type = genomic RNA
gcctgaccaacatggtgaaac

SEQ ID NO: 4203 - RNA, 23 nt, Homo sapiens
  source 1..23: mol_type = genomic RNA
taaatttcacctttctgagaagg

SEQ ID NO: 4204 - RNA, 23 nt, Homo sapiens
  source 1..23: mol_type = genomic RNA
ccttctcagaaaggtgaaattta

SEQ ID NO: 4205 - RNA, 22 nt, Homo sapiens
  source 1..22: mol_type = genomic RNA
ttcacaaggaggtgtcatttat

SEQ ID NO: 4206 - RNA, 22 nt, Homo sapiens
  source 1..22: mol_type = genomic RNA
ataaatgacacctccttgtgaa

SEQ ID NO: 4207 - RNA, 23 nt, Homo sapiens
  source 1..23: mol_type = genomic RNA
taaatttcacctttctgagaaga

SEQ ID NO: 4208 - RNA, 23 nt, Homo sapiens
  source 1..23: mol_type = genomic RNA
tcttctcagaaaggtgaaattta

SEQ ID NO: 4209 - RNA, 22 nt, Homo sapiens
  source 1..22: mol_type = genomic RNA
ttctcaaggaggtgtcgtttat

SEQ ID NO: 4210 - RNA, 22 nt, Homo sapiens
  source 1..22: mol_type = genomic RNA
ataaacgacacctccttgagaa

SEQ ID NO: 4211 - RNA, 21 nt, Homo sapiens
  source 1..21: mol_type = genomic RNA
attgacacttctgtgagtaga

SEQ ID NO: 4212 - RNA, 21 nt, Homo sapiens
  source 1..21: mol_type = genomic RNA
tctactcacagaagtgtcaat

SEQ ID NO: 4213 - RNA, 23 nt, Homo sapiens
  source 1..23: mol_type = genomic RNA
tactctggagagtgacaatcatg

SEQ ID NO: 4214 - RNA, 23 nt, Homo sapiens
  source 1..23: mol_type = genomic RNA
catgattgtcactctccagagta

SEQ ID NO: 4215 - RNA, 21 nt, Homo sapiens
  source 1..21: mol_type = genomic RNA
attgacacctctgtgagtgga

SEQ ID NO: 4216 - RNA, 21 nt, Homo sapiens
  source 1..21: mol_type = genomic RNA
tccactcacagaggtgtcaat

SEQ ID NO: 4217 - RNA, 22 nt, Homo sapiens
  source 1..22: mol_type = genomic RNA
ttctcaagagggaggcaatcat

SEQ ID NO: 4218 - RNA, 22 nt, Homo sapiens
  source 1..22: mol_type = genomic RNA
atgattgcctccctcttgagaa

SEQ ID NO: 4219 - RNA, 22 nt, Homo sapiens
  source 1..22: mol_type = genomic RNA
gagtgccttcttttggagcgtt

SEQ ID NO: 4220 - RNA, 22 nt, Homo sapiens
  source 1..22: mol_type = genomic RNA
aacgctccaaaagaaggcactc

SEQ ID NO: 4221 - RNA, 18 nt, Homo sapiens
  source 1..18: mol_type = genomic RNA
tgcttcctttcagagggt

SEQ ID NO: 4222 - RNA, 18 nt, Homo sapiens
  source 1..18: mol_type = genomic RNA
accctctgaaaggaagca

SEQ ID NO: 4223 - RNA, 22 nt, Homo sapiens
  source 1..22: mol_type = genomic RNA
atctggaggtaagaagcacttt

SEQ ID NO: 4224 - RNA, 22 nt, Homo sapiens
  source 1..22: mol_type = genomic RNA
aaagtgcttcttacctccagat

SEQ ID NO: 4225 - RNA, 22 nt, Homo sapiens
  source 1..22: mol_type = genomic RNA
gaaagcgcttccctttgctgga

SEQ ID NO: 4226 - RNA, 22 nt, Homo sapiens
  source 1..22: mol_type = genomic RNA
tccagcaaagggaagcgctttc

SEQ ID NO: 4227 - RNA, 20 nt, Homo sapiens
  source 1..20: mol_type = genomic RNA
ctgcaaagggaagccctttc

SEQ ID NO: 4228 - RNA, 20 nt, Homo sapiens
  source 1..20: mol_type = genomic RNA
gaaagggcttccctttgcag

SEQ ID NO: 4229 - RNA, 21 nt, Homo sapiens
  source 1..21: mol_type = genomic RNA
caaagcgcttccctttggagc

SEQ ID NO: 4230 - RNA, 21 nt, Homo sapiens
  source 1..21: mol_type = genomic RNA
gctccaaagggaagcgctttg

SEQ ID NO: 4231 - RNA, 22 nt, Homo sapiens
  source 1..22: mol_type = genomic RNA
ctctagagggaagcactttctg

SEQ ID NO: 4232 - RNA, 22 nt, Homo sapiens
  source 1..22: mol_type = genomic RNA
cagaaagtgcttccctctagag

SEQ ID NO: 4233 - RNA, 21 nt, Homo sapiens
  source 1..21: mol_type = genomic RNA
aaagcgcttcccttcagagtg

SEQ ID NO: 4234 - RNA, 21 nt, Homo sapiens
  source 1..21: mol_type = genomic RNA
cactctgaagggaagcgcttt

SEQ ID NO: 4235 - RNA, 22 nt, Homo sapiens
  source 1..22: mol_type = genomic RNA
ctctagagggaagcgctttctg

SEQ ID NO: 4236 - RNA, 22 nt, Homo sapiens
  source 1..22: mol_type = genomic RNA
cagaaagcgcttccctctagag

SEQ ID NO: 4237 - RNA, 22 nt, Homo sapiens
  source 1..22: mol_type = genomic RNA
aaagtgcatccttttagaggtt

SEQ ID NO: 4238 - RNA, 22 nt, Homo sapiens
  source 1..22: mol_type = genomic RNA
aacctctaaaaggatgcacttt

SEQ ID NO: 4239 - RNA, 22 nt, Homo sapiens
  source 1..22: mol_type = genomic RNA
ctctagagggaagcgctttctg

SEQ ID NO: 4240 - RNA, 22 nt, Homo sapiens
  source 1..22: mol_type = genomic RNA
cagaaagcgcttccctctagag

SEQ ID NO: 4241 - RNA, 22 nt, Homo sapiens
  source 1..22: mol_type = genomic RNA
aaagtgcatctttttagaggat

SEQ ID NO: 4242 - RNA, 22 nt, Homo sapiens
  source 1..22: mol_type = genomic RNA
atcctctaaaaagatgcacttt

SEQ ID NO: 4243 - RNA, 22 nt, Homo sapiens
  source 1..22: mol_type = genomic RNA
ctctagagggaagcgctttctg

SEQ ID NO: 4244 - RNA, 22 nt, Homo sapiens
  source 1..22: mol_type = genomic RNA
cagaaagcgcttccctctagag

SEQ ID NO: 4245 - RNA, 21 nt, Homo sapiens
  source 1..21: mol_type = genomic RNA
aaagtgcttccttttagaggg

SEQ ID NO: 4246 - RNA, 21 nt, Homo sapiens
  source 1..21: mol_type = genomic RNA
ccctctaaaaggaagcacttt

SEQ ID NO: 4247 - RNA, 22 nt, Homo sapiens
  source 1..22: mol_type = genomic RNA
aaagtgcttccttttagagggt

SEQ ID NO: 4248 - RNA, 22 nt, Homo sapiens
  source 1..22: mol_type = genomic RNA
accctctaaaaggaagcacttt

SEQ ID NO: 4249 - RNA, 22 nt, Homo sapiens
  source 1..22: mol_type = genomic RNA
ctctagagggaagcactttctg

SEQ ID NO: 4250 - RNA, 22 nt, Homo sapiens
  source 1..22: mol_type = genomic RNA
cagaaagtgcttccctctagag

SEQ ID NO: 4251 - RNA, 22 nt, Homo sapiens
  source 1..22: mol_type = genomic RNA
aaagtgcttctctttggtgggt

SEQ ID NO: 4252 - RNA, 22 nt, Homo sapiens
  source 1..22: mol_type = genomic RNA
acccaccaaagagaagcacttt

SEQ ID NO: 4253 - RNA, 20 nt, Homo sapiens
  source 1..20: mol_type = genomic RNA
ctacaaagggaagccctttc

SEQ ID NO: 4254 - RNA, 20 nt, Homo sapiens
  source 1..20: mol_type = genomic RNA
gaaagggcttccctttgtag

SEQ ID NO: 4255 - RNA, 21 nt, Homo sapiens
  source 1..21: mol_type = genomic RNA
aaagtgcttcctttttgaggg

SEQ ID NO: 4256 - RNA, 21 nt, Homo sapiens
  source 1..21: mol_type = genomic RNA
ccctcaaaaaggaagcacttt

SEQ ID NO: 4257 - RNA, 22 nt, Homo sapiens
  source 1..22: mol_type = genomic RNA
aagtgcttccttttagagggtt

SEQ ID NO: 4258 - RNA, 22 nt, Homo sapiens
  source 1..22: mol_type = genomic RNA
aaccctctaaaaggaagcactt

SEQ ID NO: 4259 - RNA, 24 nt, Homo sapiens
  source 1..24: mol_type = genomic RNA
acaaagtgcttccctttagagtgt

SEQ ID NO: 4260 - RNA, 24 nt, Homo sapiens
  source 1..24: mol_type = genomic RNA
acactctaaagggaagcactttgt

SEQ ID NO: 4261 - RNA, 22 nt, Homo sapiens
  source 1..22: mol_type = genomic RNA
aacgcacttccctttagagtgt

SEQ ID NO: 4262 - RNA, 22 nt, Homo sapiens
  source 1..22: mol_type = genomic RNA
acactctaaagggaagtgcgtt

SEQ ID NO: 4263 - RNA, 22 nt, Homo sapiens
  source 1..22: mol_type = genomic RNA
aaaatggttccctttagagtgt

SEQ ID NO: 4264 - RNA, 22 nt, Homo sapiens
  source 1..22: mol_type = genomic RNA
acactctaaagggaaccatttt

SEQ ID NO: 4265 - RNA, 22 nt, Homo sapiens
  source 1..22: mol_type = genomic RNA
ctctagagggaagcgctttctg

SEQ ID NO: 4266 - RNA, 22 nt, Homo sapiens
  source 1..22: mol_type = genomic RNA
cagaaagcgcttccctctagag

SEQ ID NO: 4267 - RNA, 23 nt, Homo sapiens
  source 1..23: mol_type = genomic RNA
gaacgcgcttccctatagagggt

SEQ ID NO: 4268 - RNA, 23 nt, Homo sapiens
  source 1..23: mol_type = genomic RNA
accctctatagggaagcgcgttc

SEQ ID NO: 4269 - RNA, 22 nt, Homo sapiens
  source 1..22: mol_type = genomic RNA
ctctagagggaagcgctttctg

SEQ ID NO: 4270 - RNA, 22 nt, Homo sapiens
  source 1..22: mol_type = genomic RNA
cagaaagcgcttccctctagag

SEQ ID NO: 4271 - RNA, 21 nt, Homo sapiens
  source 1..21: mol_type = genomic RNA
gaaggcgcttccctttggagt

SEQ ID NO: 4272 - RNA, 21 nt, Homo sapiens
  source 1..21: mol_type = genomic RNA
actccaaagggaagcgccttc

SEQ ID NO: 4273 - RNA, 20 nt, Homo sapiens
  source 1..20: mol_type = genomic RNA
ctgcaaagggaagccctttc

SEQ ID NO: 4274 - RNA, 20 nt, Homo sapiens
  source 1..20: mol_type = genomic RNA
gaaagggcttccctttgcag

SEQ ID NO: 4275 - RNA, 22 nt, Homo sapiens
  source 1..22: mol_type = genomic RNA
cctcccacacccaaggcttgca

SEQ ID NO: 4276 - RNA, 22 nt, Homo sapiens
  source 1..22: mol_type = genomic RNA
tgcaagccttgggtgtgggagg

SEQ ID NO: 4277 - RNA, 22 nt, Homo sapiens
  source 1..22: mol_type = genomic RNA
catgccttgagtgtaggaccgt

SEQ ID NO: 4278 - RNA, 22 nt, Homo sapiens
  source 1..22: mol_type = genomic RNA
acggtcctacactcaaggcatg

SEQ ID NO: 4279 - RNA, 22 nt, Homo sapiens
  source 1..22: mol_type = genomic RNA
atcatacaaggacaatttcttt

SEQ ID NO: 4280 - RNA, 22 nt, Homo sapiens
  source 1..22: mol_type = genomic RNA
aaagaaattgtccttgtatgat

SEQ ID NO: 4281 - RNA, 22 nt, Homo sapiens
  source 1..22: mol_type = genomic RNA
ggagaaattatccttggtgtgt

SEQ ID NO: 4282 - RNA, 22 nt, Homo sapiens
  source 1..22: mol_type = genomic RNA
acacaccaaggataatttctcc

SEQ ID NO: 4283 - RNA, 22 nt, Homo sapiens
  source 1..22: mol_type = genomic RNA
tggtgggcacagaatctggact

SEQ ID NO: 4284 - RNA, 22 nt, Homo sapiens
  source 1..22: mol_type = genomic RNA
agtccagattctgtgcccacca

SEQ ID NO: 4285 - RNA, 25 nt, Homo sapiens
  source 1..25: mol_type = genomic RNA
aaaggattctgctgtcggtcccact

SEQ ID NO: 4286 - RNA, 25 nt, Homo sapiens
  source 1..25: mol_type = genomic RNA
agtgggaccgacagcagaatccttt

SEQ ID NO: 4287 - RNA, 23 nt, Homo sapiens
  source 1..23: mol_type = genomic RNA
tcggggatcatcatgtcacgaga

SEQ ID NO: 4288 - RNA, 23 nt, Homo sapiens
  source 1..23: mol_type = genomic RNA
tctcgtgacatgatgatccccga

SEQ ID NO: 4289 - RNA, 22 nt, Homo sapiens
  source 1..22: mol_type = genomic RNA
aaacattcgcggtgcacttctt

SEQ ID NO: 4290 - RNA, 22 nt, Homo sapiens
  source 1..22: mol_type = genomic RNA
aagaagtgcaccgcgaatgttt

SEQ ID NO: 4291 - RNA, 22 nt, Homo sapiens
  source 1..22: mol_type = genomic RNA
attctgcatttttagcaagttc

SEQ ID NO: 4292 - RNA, 22 nt, Homo sapiens
  source 1..22: mol_type = genomic RNA
gaacttgctaaaaatgcagaat

SEQ ID NO: 4293 - RNA, 22 nt, Homo sapiens
  source 1..22: mol_type = genomic RNA
acctgaggttgtgcatttctaa

SEQ ID NO: 4294 - RNA, 22 nt, Homo sapiens
  source 1..22: mol_type = genomic RNA
ttagaaatgcacaacctcaggt

SEQ ID NO: 4295 - RNA, 22 nt, Homo sapiens
  source 1..22: mol_type = genomic RNA
tcagcaaacatttattgtgtgc

SEQ ID NO: 4296 - RNA, 22 nt, Homo sapiens
  source 1..22: mol_type = genomic RNA
gcacacaataaatgtttgctga

SEQ ID NO: 4297 - RNA, 22 nt, Homo sapiens
  source 1..22: mol_type = genomic RNA
tcagtaaatgtttattagatga

SEQ ID NO: 4298 - RNA, 22 nt, Homo sapiens
  source 1..22: mol_type = genomic RNA
tcatctaataaacatttactga

SEQ ID NO: 4299 - RNA, 22 nt, Homo sapiens
  source 1..22: mol_type = genomic RNA
agctacagttacttttgcacca

SEQ ID NO: 4300 - RNA, 22 nt, Homo sapiens
  source 1..22: mol_type = genomic RNA
tggtgcaaaagtaactgtagct

SEQ ID NO: 4301 - RNA, 20 nt, Homo sapiens
  source 1..20: mol_type = genomic RNA
taaaaactgcaattactttc

SEQ ID NO: 4302 - RNA, 20 nt, Homo sapiens
  source 1..20: mol_type = genomic RNA
gaaagtaattgcagttttta

SEQ ID NO: 4303 - RNA, 23 nt, Homo sapiens
  source 1..23: mol_type = genomic RNA
tgcaaaagtaattgcagtttttg

SEQ ID NO: 4304 - RNA, 23 nt, Homo sapiens
  source 1..23: mol_type = genomic RNA
caaaaactgcaattacttttgca

SEQ ID NO: 4305 - RNA, 22 nt, Homo sapiens
  source 1..22: mol_type = genomic RNA
aaagaccgtgactacttttgca

SEQ ID NO: 4306 - RNA, 22 nt, Homo sapiens
  source 1..22: mol_type = genomic RNA
tgcaaaagtagtcacggtcttt

SEQ ID NO: 4307 - RNA, 22 nt, Homo sapiens
  source 1..22: mol_type = genomic RNA
agaagtaactacggtttttgca

SEQ ID NO: 4308 - RNA, 22 nt, Homo sapiens
  source 1..22: mol_type = genomic RNA
tgcaaaaaccgtagttacttct

SEQ ID NO: 4309 - RNA, 19 nt, Homo sapiens
  source 1..19: mol_type = genomic RNA
aaaaaccacaattactttt

SEQ ID NO: 4310 - RNA, 19 nt, Homo sapiens
  source 1..19: mol_type = genomic RNA
aaaagtaattgtggttttt

SEQ ID NO: 4311 - RNA, 19 nt, Homo sapiens
  source 1..19: mol_type = genomic RNA
aaaagtaattgcggtcttt

SEQ ID NO: 4312 - RNA, 19 nt, Homo sapiens
  source 1..19: mol_type = genomic RNA
aaagaccgcaattactttt

SEQ ID NO: 4313 - RNA, 22 nt, Homo sapiens
  source 1..22: mol_type = genomic RNA
caaaaactgcaattacttttgc

SEQ ID NO: 4314 - RNA, 22 nt, Homo sapiens
  source 1..22: mol_type = genomic RNA
gcaaaagtaattgcagtttttg

SEQ ID NO: 4315 - RNA, 22 nt, Homo sapiens
  source 1..22: mol_type = genomic RNA
gaaagtaattgctgtttttgcc

SEQ ID NO: 4316 - RNA, 22 nt, Homo sapiens
  source 1..22: mol_type = genomic RNA
ggcaaaaacagcaattactttc

SEQ ID NO: 4317 - RNA, 21 nt, Homo sapiens
  source 1..21: mol_type = genomic RNA
taaaactgcagttatttttgc

SEQ ID NO: 4318 - RNA, 21 nt, Homo sapiens
  source 1..21: mol_type = genomic RNA
gcaaaaataactgcagtttta

SEQ ID NO: 4319 - RNA, 21 nt, Homo sapiens
  source 1..21: mol_type = genomic RNA
aaaagtaattgcagtttttgc

SEQ ID NO: 4320 - RNA, 21 nt, Homo sapiens
  source 1..21: mol_type = genomic RNA
gcaaaaactgcaattactttt

SEQ ID NO: 4321 - RNA, 22 nt, Homo sapiens
  source 1..22: mol_type = genomic RNA
taaaacccacaattatgtttgt

SEQ ID NO: 4322 - RNA, 22 nt, Homo sapiens
  source 1..22: mol_type = genomic RNA
acaaacataattgtgggtttta

SEQ ID NO: 4323 - RNA, 22 nt, Homo sapiens
  source 1..22: mol_type = genomic RNA
aaaagtaattgcgggttttgcc

SEQ ID NO: 4324 - RNA, 22 nt, Homo sapiens
  source 1..22: mol_type = genomic RNA
ggcaaaacccgcaattactttt

SEQ ID NO: 4325 - RNA, 21 nt, Homo sapiens
  source 1..21: mol_type = genomic RNA
caaaaccgcagtaacttttgt

SEQ ID NO: 4326 - RNA, 21 nt, Homo sapiens
  source 1..21: mol_type = genomic RNA
acaaaagttactgcggttttg

SEQ ID NO: 4327 - RNA, 22 nt, Homo sapiens
  source 1..22: mol_type = genomic RNA
aaaagttattgcggttttggct

SEQ ID NO: 4328 - RNA, 22 nt, Homo sapiens
  source 1..22: mol_type = genomic RNA
agccaaaaccgcaataactttt

SEQ ID NO: 4329 - RNA, 21 nt, Homo sapiens
  source 1..21: mol_type = genomic RNA
tggcagttacttttgcaccag

SEQ ID NO: 4330 - RNA, 21 nt, Homo sapiens
  source 1..21: mol_type = genomic RNA
ctggtgcaaaagtaactgcca

SEQ ID NO: 4331 - RNA, 21 nt, Homo sapiens
  source 1..21: mol_type = genomic RNA
aaaagtaattgcggtttttgc

SEQ ID NO: 4332 - RNA, 21 nt, Homo sapiens
  source 1..21: mol_type = genomic RNA
gcaaaaaccgcaattactttt

SEQ ID NO: 4333 - RNA, 20 nt, Homo sapiens
  source 1..20: mol_type = genomic RNA
aaaactgcagttacttttgc

SEQ ID NO: 4334 - RNA, 20 nt, Homo sapiens
  source 1..20: mol_type = genomic RNA
gcaaaagtaactgcagtttt

SEQ ID NO: 4335 - RNA, 18 nt, Homo sapiens
  source 1..18: mol_type = genomic RNA
aaaagtacttgcggattt

SEQ ID NO: 4336 - RNA, 18 nt, Homo sapiens
  source 1..18: mol_type = genomic RNA
aaatccgcaagtactttt

SEQ ID NO: 4337 - RNA, 20 nt, Homo sapiens
  source 1..20: mol_type = genomic RNA
gtgcaaaagtcatcacggtt

SEQ ID NO: 4338 - RNA, 20 nt, Homo sapiens
  source 1..20: mol_type = genomic RNA
aaccgtgatgacttttgcac

SEQ ID NO: 4339 - RNA, 22 nt, Homo sapiens
  source 1..22: mol_type = genomic RNA
gctggtgcaaaagtaatggcgg

SEQ ID NO: 4340 - RNA, 22 nt, Homo sapiens
  source 1..22: mol_type = genomic RNA
ccgccattacttttgcaccagc

SEQ ID NO: 4341 - RNA, 22 nt, Homo sapiens
  source 1..22: mol_type = genomic RNA
aaaagtaatcactgtttttgcc

SEQ ID NO: 4342 - RNA, 22 nt, Homo sapiens
  source 1..22: mol_type = genomic RNA
ggcaaaaacagtgattactttt

SEQ ID NO: 4343 - RNA, 20 nt, Homo sapiens
  source 1..20: mol_type = genomic RNA
agtgcctgagggagtaagag

SEQ ID NO: 4344 - RNA, 20 nt, Homo sapiens
  source 1..20: mol_type = genomic RNA
ctcttactccctcaggcact

SEQ ID NO: 4345 - RNA, 22 nt, Homo sapiens
  source 1..22: mol_type = genomic RNA
tgtcttactccctcaggcacat

SEQ ID NO: 4346 - RNA, 22 nt, Homo sapiens
  source 1..22: mol_type = genomic RNA
atgtgcctgagggagtaagaca

SEQ ID NO: 4347 - RNA, 23 nt, Homo sapiens
  source 1..23: mol_type = genomic RNA
agtgcctgagggagtaagagccc

SEQ ID NO: 4348 - RNA, 23 nt, Homo sapiens
  source 1..23: mol_type = genomic RNA
gggctcttactccctcaggcact

SEQ ID NO: 4349 - RNA, 21 nt, Homo sapiens
  source 1..21: mol_type = genomic RNA
gcgacccactcttggtttcca

SEQ ID NO: 4350 - RNA, 21 nt, Homo sapiens
  source 1..21: mol_type = genomic RNA
tggaaaccaagagtgggtcgc

SEQ ID NO: 4351 - RNA, 22 nt, Homo sapiens
  source 1..22: mol_type = genomic RNA
ttagcttaaggagtaccagatc

SEQ ID NO: 4352 - RNA, 22 nt, Homo sapiens
  source 1..22: mol_type = genomic RNA
gatctggtactccttaagctaa

SEQ ID NO: 4353 - RNA, 21 nt, Homo sapiens
  source 1..21: mol_type = genomic RNA
tatggtactccttaagctaac

SEQ ID NO: 4354 - RNA, 21 nt, Homo sapiens
  source 1..21: mol_type = genomic RNA
gttagcttaaggagtaccata

SEQ ID NO: 4355 - RNA, 19 nt, Homo sapiens
  source 1..19: mol_type = genomic RNA
tgagctgctgtaccaaaat

SEQ ID NO: 4356 - RNA, 19 nt, Homo sapiens
  source 1..19: mol_type = genomic RNA
attttggtacagcagctca

SEQ ID NO: 4357 - RNA, 22 nt, Homo sapiens
  source 1..22: mol_type = genomic RNA
cacatatgaagtgagccagcac

SEQ ID NO: 4358 - RNA, 22 nt, Homo sapiens
  source 1..22: mol_type = genomic RNA
gtgctggctcacttcatatgtg

SEQ ID NO: 4359 - RNA, 22 nt, Homo sapiens
  source 1..22: mol_type = genomic RNA
tgctggctcatttcatatgtgt

SEQ ID NO: 4360 - RNA, 22 nt, Homo sapiens
  source 1..22: mol_type = genomic RNA
acacatatgaaatgagccagca

SEQ ID NO: 4361 - RNA, 22 nt, Homo sapiens
  source 1..22: mol_type = genomic RNA
ttccatgcctcctagaagttcc

SEQ ID NO: 4362 - RNA, 22 nt, Homo sapiens
  source 1..22: mol_type = genomic RNA
ggaacttctaggaggcatggaa

SEQ ID NO: 4363 - RNA, 22 nt, Homo sapiens
  source 1..22: mol_type = genomic RNA
agccttccaggagaaatggaga

SEQ ID NO: 4364 - RNA, 22 nt, Homo sapiens
  source 1..22: mol_type = genomic RNA
tctccatttctcctggaaggct

SEQ ID NO: 4365 - RNA, 22 nt, Homo sapiens
  source 1..22: mol_type = genomic RNA
taaaactttaagtgtgcctagg

SEQ ID NO: 4366 - RNA, 22 nt, Homo sapiens
  source 1..22: mol_type = genomic RNA
cctaggcacacttaaagtttta

SEQ ID NO: 4367 - RNA, 22 nt, Homo sapiens
  source 1..22: mol_type = genomic RNA
taggcacacttaaagttatagc

SEQ ID NO: 4368 - RNA, 22 nt, Homo sapiens
  source 1..22: mol_type = genomic RNA
gctataactttaagtgtgccta

SEQ ID NO: 4369 - RNA, 22 nt, Homo sapiens
  source 1..22: mol_type = genomic RNA
gaatatgggtatattagtttgg

SEQ ID NO: 4370 - RNA, 22 nt, Homo sapiens
  source 1..22: mol_type = genomic RNA
ccaaactaatatacccatattc

SEQ ID NO: 4371 - RNA, 22 nt, Homo sapiens
  source 1..22: mol_type = genomic RNA
aaactaatatacccatattctg

SEQ ID NO: 4372 - RNA, 22 nt, Homo sapiens
  source 1..22: mol_type = genomic RNA
cagaatatgggtatattagttt

SEQ ID NO: 4373 - RNA, 22 nt, Homo sapiens
  source 1..22: mol_type = genomic RNA
tagttcttccctttgcccaatt

SEQ ID NO: 4374 - RNA, 22 nt, Homo sapiens
  source 1..22: mol_type = genomic RNA
aattgggcaaagggaagaacta

SEQ ID NO: 4375 - RNA, 22 nt, Homo sapiens
  source 1..22: mol_type = genomic RNA
cagggaaatgggaagaactaga

SEQ ID NO: 4376 - RNA, 22 nt, Homo sapiens
  source 1..22: mol_type = genomic RNA
tctagttcttcccatttccctg

SEQ ID NO: 4377 - RNA, 22 nt, Homo sapiens
  source 1..22: mol_type = genomic RNA
ctgaatagctgggactacaggt

SEQ ID NO: 4378 - RNA, 22 nt, Homo sapiens
  source 1..22: mol_type = genomic RNA
acctgtagtcccagctattcag

SEQ ID NO: 4379 - RNA, 22 nt, Homo sapiens
  source 1..22: mol_type = genomic RNA
tgaagtaccagctactcgagag

SEQ ID NO: 4380 - RNA, 22 nt, Homo sapiens
  source 1..22: mol_type = genomic RNA
ctctcgagtagctggtacttca

SEQ ID NO: 4381 - RNA, 22 nt, Homo sapiens
  source 1..22: mol_type = genomic RNA
cagagtgacaagctggttaaag

SEQ ID NO: 4382 - RNA, 22 nt, Homo sapiens
  source 1..22: mol_type = genomic RNA
ctttaaccagcttgtcactctg

SEQ ID NO: 4383 - RNA, 22 nt, Homo sapiens
  source 1..22: mol_type = genomic RNA
tatccagcttgttactatatgc

SEQ ID NO: 4384 - RNA, 22 nt, Homo sapiens
  source 1..22: mol_type = genomic RNA
gcatatagtaacaagctggata

SEQ ID NO: 4385 - RNA, 21 nt, Homo sapiens
  source 1..21: mol_type = genomic RNA
gccccgggcagtgtgatcatc

SEQ ID NO: 4386 - RNA, 21 nt, Homo sapiens
  source 1..21: mol_type = genomic RNA
gatgatcacactgcccggggc

SEQ ID NO: 4387 - RNA, 18 nt, Homo sapiens
  source 1..18: mol_type = genomic RNA
atggtcacctccgggact

SEQ ID NO: 4388 - RNA, 18 nt, Homo sapiens
  source 1..18: mol_type = genomic RNA
agtcccggaggtgaccat

SEQ ID NO: 4389 - RNA, 19 nt, Homo sapiens
  source 1..19: mol_type = genomic RNA
aagtcccactaatgccagc

SEQ ID NO: 4390 - RNA, 19 nt, Homo sapiens
  source 1..19: mol_type = genomic RNA
gctggcattagtgggactt

SEQ ID NO: 4391 - RNA, 21 nt, Homo sapiens
  source 1..21: mol_type = genomic RNA
actggcattagtgggactttt

SEQ ID NO: 4392 - RNA, 21 nt, Homo sapiens
  source 1..21: mol_type = genomic RNA
aaaagtcccactaatgccagt

SEQ ID NO: 4393 - RNA, 23 nt, Homo sapiens
  source 1..23: mol_type = genomic RNA
tgcacatggcaacctagctccca

SEQ ID NO: 4394 - RNA, 23 nt, Homo sapiens
  source 1..23: mol_type = genomic RNA
tgggagctaggttgccatgtgca

SEQ ID NO: 4395 - RNA, 21 nt, Homo sapiens
  source 1..21: mol_type = genomic RNA
ggctgggtgctcttgtgcagt

SEQ ID NO: 4396 - RNA, 21 nt, Homo sapiens
  source 1..21: mol_type = genomic RNA
actgcacaagagcacccagcc

SEQ ID NO: 4397 - RNA, 21 nt, Homo sapiens
  source 1..21: mol_type = genomic RNA
taaagtaaatatgcaccaaaa

SEQ ID NO: 4398 - RNA, 21 nt, Homo sapiens
  source 1..21: mol_type = genomic RNA
ttttggtgcatatttacttta

SEQ ID NO: 4399 - RNA, 21 nt, Homo sapiens
  source 1..21: mol_type = genomic RNA
aataaagttcatgtatggcaa

SEQ ID NO: 4400 - RNA, 21 nt, Homo sapiens
  source 1..21: mol_type = genomic RNA
ttgccatacatgaactttatt

SEQ ID NO: 4401 - RNA, 21 nt, Homo sapiens
  source 1..21: mol_type = genomic RNA
ttgccatacatagactttatt

SEQ ID NO: 4402 - RNA, 21 nt, Homo sapiens
  source 1..21: mol_type = genomic RNA
aataaagtctatgtatggcaa

SEQ ID NO: 4403 - RNA, 21 nt, Homo sapiens
  source 1..21: mol_type = genomic RNA
atacccatagcttagctccca

SEQ ID NO: 4404 - RNA, 21 nt, Homo sapiens
  source 1..21: mol_type = genomic RNA
tgggagctaagctatgggtat

SEQ ID NO: 4405 - RNA, 21 nt, Homo sapiens
  source 1..21: mol_type = genomic RNA
tgggagctaagctatgggtat

SEQ ID NO: 4406 - RNA, 21 nt, Homo sapiens
  source 1..21: mol_type = genomic RNA
atacccatagcttagctccca

SEQ ID NO: 4407 - RNA, 22 nt, Homo sapiens
  source 1..22: mol_type = genomic RNA
caaagtttaagatccttgaagt

SEQ ID NO: 4408 - RNA, 22 nt, Homo sapiens
  source 1..22: mol_type = genomic RNA
acttcaaggatcttaaactttg

SEQ ID NO: 4409 - RNA, 22 nt, Homo sapiens
  source 1..22: mol_type = genomic RNA
atcaaggatcttaaactttgcc

SEQ ID NO: 4410 - RNA, 22 nt, Homo sapiens
  source 1..22: mol_type = genomic RNA
ggcaaagtttaagatccttgat

SEQ ID NO: 4411 - RNA, 20 nt, Homo sapiens
  source 1..20: mol_type = genomic RNA
aaagtagctgtaccatttgc

SEQ ID NO: 4412 - RNA, 20 nt, Homo sapiens
  source 1..20: mol_type = genomic RNA
gcaaatggtacagctacttt

SEQ ID NO: 4413 - RNA, 19 nt, Homo sapiens
  source 1..19: mol_type = genomic RNA
aggcacggtgtcagcaggc

SEQ ID NO: 4414 - RNA, 19 nt, Homo sapiens
  source 1..19: mol_type = genomic RNA
gcctgctgacaccgtgcct

SEQ ID NO: 4415 - RNA, 19 nt, Homo sapiens
  source 1..19: mol_type = genomic RNA
gggcgcctgtgatcccaac

SEQ ID NO: 4416 - RNA, 19 nt, Homo sapiens
  source 1..19: mol_type = genomic RNA
gttgggatcacaggcgccc

SEQ ID NO: 4417 - RNA, 23 nt, Homo sapiens
  source 1..23: mol_type = genomic RNA
agtatgttcttccaggacagaac

SEQ ID NO: 4418 - RNA, 23 nt, Homo sapiens
  source 1..23: mol_type = genomic RNA
gttctgtcctggaagaacatact

SEQ ID NO: 4419 - RNA, 22 nt, Homo sapiens
  source 1..22: mol_type = genomic RNA
gagaaatgctggactaatctgc

SEQ ID NO: 4420 - RNA, 22 nt, Homo sapiens
  source 1..22: mol_type = genomic RNA
gcagattagtccagcatttctc

SEQ ID NO: 4421 - RNA, 22 nt, Homo sapiens
  source 1..22: mol_type = genomic RNA
agaaagggtggcaatacctctt

SEQ ID NO: 4422 - RNA, 22 nt, Homo sapiens
  source 1..22: mol_type = genomic RNA
aagaggtattgccaccctttct

SEQ ID NO: 4423 - RNA, 22 nt, Homo sapiens
  source 1..22: mol_type = genomic RNA
aggtattgccaccctttctagt

SEQ ID NO: 4424 - RNA, 22 nt, Homo sapiens
  source 1..22: mol_type = genomic RNA
actagaaagggtggcaatacct

SEQ ID NO: 4425 - RNA, 22 nt, Homo sapiens
  source 1..22: mol_type = genomic RNA
gtagcaccttgcaggataaggt

SEQ ID NO: 4426 - RNA, 22 nt, Homo sapiens
  source 1..22: mol_type = genomic RNA
accttatcctgcaaggtgctac

SEQ ID NO: 4427 - RNA, 24 nt, Homo sapiens
  source 1..24: mol_type = genomic RNA
tacagatgcagattctctgacttc

SEQ ID NO: 4428 - RNA, 24 nt, Homo sapiens
  source 1..24: mol_type = genomic RNA
gaagtcagagaatctgcatctgta

SEQ ID NO: 4429 - RNA, 20 nt, Homo sapiens
  source 1..20: mol_type = genomic RNA
aactctagcctgagcaacag

SEQ ID NO: 4430 - RNA, 20 nt, Homo sapiens
  source 1..20: mol_type = genomic RNA
ctgttgctcaggctagagtt

SEQ ID NO: 4431 - RNA, 22 nt, Homo sapiens
  source 1..22: mol_type = genomic RNA
acagcccagcagttatcacggg

SEQ ID NO: 4432 - RNA, 22 nt, Homo sapiens
  source 1..22: mol_type = genomic RNA
cccgtgataactgctgggctgt

SEQ ID NO: 4433 - RNA, 21 nt, Homo sapiens
  source 1..21: mol_type = genomic RNA
tatcgtatcgtattgtattgt

SEQ ID NO: 4434 - RNA, 21 nt, Homo sapiens
  source 1..21: mol_type = genomic RNA
acaatacaatacgatacgata

SEQ ID NO: 4435 - RNA, 22 nt, Homo sapiens
  source 1..22: mol_type = genomic RNA
ttagaacgttttagggtcaaat

SEQ ID NO: 4436 - RNA, 22 nt, Homo sapiens
  source 1..22: mol_type = genomic RNA
atttgaccctaaaacgttctaa

SEQ ID NO: 4437 - RNA, 22 nt, Homo sapiens
  source 1..22: mol_type = genomic RNA
taacaaacacctgtaaaacagc

SEQ ID NO: 4438 - RNA, 22 nt, Homo sapiens
  source 1..22: mol_type = genomic RNA
gctgttttacaggtgtttgtta

SEQ ID NO: 4439 - RNA, 22 nt, Homo sapiens
  source 1..22: mol_type = genomic RNA
agcatacacctgtagtcctaga

SEQ ID NO: 4440 - RNA, 22 nt, Homo sapiens
  source 1..22: mol_type = genomic RNA
tctaggactacaggtgtatgct

SEQ ID NO: 4441 - RNA, 21 nt, Homo sapiens
  source 1..21: mol_type = genomic RNA
agttaatgaatcctggaaagt

SEQ ID NO: 4442 - RNA, 21 nt, Homo sapiens
  source 1..21: mol_type = genomic RNA
actttccaggattcattaact

SEQ ID NO: 4443 - RNA, 21 nt, Homo sapiens
  source 1..21: mol_type = genomic RNA
tcagctactacctctattagg

SEQ ID NO: 4444 - RNA, 21 nt, Homo sapiens
  source 1..21: mol_type = genomic RNA
cctaatagaggtagtagctga

SEQ ID NO: 4445 - RNA, 22 nt, Homo sapiens
  source 1..22: mol_type = genomic RNA
ttgctctgagctccgagaaagc

SEQ ID NO: 4446 - RNA, 22 nt, Homo sapiens
  source 1..22: mol_type = genomic RNA
gctttctcggagctcagagcaa

SEQ ID NO: 4447 - RNA, 22 nt, Homo sapiens
  source 1..22: mol_type = genomic RNA
caaataataccacagtgggtgt

SEQ ID NO: 4448 - RNA, 22 nt, Homo sapiens
  source 1..22: mol_type = genomic RNA
acacccactgtggtattatttg

SEQ ID NO: 4449 - RNA, 20 nt, Homo sapiens
  source 1..20: mol_type = genomic RNA
aataatatcacagtaggtgt

SEQ ID NO: 4450 - RNA, 20 nt, Homo sapiens
  source 1..20: mol_type = genomic RNA
acacctactgtgatattatt

SEQ ID NO: 4451 - RNA, 22 nt, Homo sapiens
  source 1..22: mol_type = genomic RNA
aataatatcacagtaggtgtac

SEQ ID NO: 4452 - RNA, 22 nt, Homo sapiens
  source 1..22: mol_type = genomic RNA
gtacacctactgtgatattatt

SEQ ID NO: 4453 - RNA, 22 nt, Homo sapiens
  source 1..22: mol_type = genomic RNA
gcagtggctctgaaatgaactc

SEQ ID NO: 4454 - RNA, 22 nt, Homo sapiens
  source 1..22: mol_type = genomic RNA
gagttcatttcagagccactgc

SEQ ID NO: 4455 - RNA, 21 nt, Homo sapiens
  source 1..21: mol_type = genomic RNA
cagatcatgggactgtctcag

SEQ ID NO: 4456 - RNA, 21 nt, Homo sapiens
  source 1..21: mol_type = genomic RNA
ctgagacagtcccatgatctg

SEQ ID NO: 4457 - RNA, 22 nt, Homo sapiens
  source 1..22: mol_type = genomic RNA
actccaagaagaatctagacag

SEQ ID NO: 4458 - RNA, 22 nt, Homo sapiens
  source 1..22: mol_type = genomic RNA
ctgtctagattcttcttggagt

SEQ ID NO: 4459 - RNA, 22 nt, Homo sapiens
  source 1..22: mol_type = genomic RNA
ctcatttaagtagtctgatgcc

SEQ ID NO: 4460 - RNA, 22 nt, Homo sapiens
  source 1..22: mol_type = genomic RNA
ggcatcagactacttaaatgag

SEQ ID NO: 4461 - RNA, 22 nt, Homo sapiens
  source 1..22: mol_type = genomic RNA
tcaagtagtttcatgataaagg

SEQ ID NO: 4462 - RNA, 22 nt, Homo sapiens
  source 1..22: mol_type = genomic RNA
cctttatcatgaaactacttga

SEQ ID NO: 4463 - RNA, 22 nt, Homo sapiens
  source 1..22: mol_type = genomic RNA
tgggggagtgcagtgattgtgg

SEQ ID NO: 4464 - RNA, 22 nt, Homo sapiens
  source 1..22: mol_type = genomic RNA
ccacaatcactgcactccccca

SEQ ID NO: 4465 - RNA, 22 nt, Homo sapiens
  source 1..22: mol_type = genomic RNA
tcctgtctttccttgttggagc

SEQ ID NO: 4466 - RNA, 22 nt, Homo sapiens
  source 1..22: mol_type = genomic RNA
gctccaacaaggaaagacagga

SEQ ID NO: 4467 - RNA, 22 nt, Homo sapiens
  source 1..22: mol_type = genomic RNA
taatgcattaaattattgaagg

SEQ ID NO: 4468 - RNA, 22 nt, Homo sapiens
  source 1..22: mol_type = genomic RNA
ccttcaataatttaatgcatta

SEQ ID NO: 4469 - RNA, 19 nt, Homo sapiens
  source 1..19: mol_type = genomic RNA
ttattgtcacgttctgatt

SEQ ID NO: 4470 - RNA, 19 nt, Homo sapiens
  source 1..19: mol_type = genomic RNA
aatcagaacgtgacaataa

SEQ ID NO: 4471 - RNA, 22 nt, Homo sapiens
  source 1..22: mol_type = genomic RNA
tgagtcagcaacatatcccatg

SEQ ID NO: 4472 - RNA, 22 nt, Homo sapiens
  source 1..22: mol_type = genomic RNA
catgggatatgttgctgactca

SEQ ID NO: 4473 - RNA, 18 nt, Homo sapiens
  source 1..18: mol_type = genomic RNA
aggagaagtcgggaaggt

SEQ ID NO: 4474 - RNA, 18 nt, Homo sapiens
  source 1..18: mol_type = genomic RNA
accttcccgacttctcct

SEQ ID NO: 4475 - RNA, 22 nt, Homo sapiens
  source 1..22: mol_type = genomic RNA
cgaaaacagcaattacctttgc

SEQ ID NO: 4476 - RNA, 22 nt, Homo sapiens
  source 1..22: mol_type = genomic RNA
gcaaaggtaattgctgttttcg

SEQ ID NO: 4477 - RNA, 22 nt, Homo sapiens
  source 1..22: mol_type = genomic RNA
ttaggccatcatcccattatgc

SEQ ID NO: 4478 - RNA, 22 nt, Homo sapiens
  source 1..22: mol_type = genomic RNA
gcataatgggatgatggcctaa

SEQ ID NO: 4479 - RNA, 23 nt, Homo sapiens
  source 1..23: mol_type = genomic RNA
tgtttcggggctcatggcctgtg

SEQ ID NO: 4480 - RNA, 23 nt, Homo sapiens
  source 1..23: mol_type = genomic RNA
cacaggccatgagccccgaaaca

SEQ ID NO: 4481 - RNA, 22 nt, Homo sapiens
  source 1..22: mol_type = genomic RNA
aaaggtaattgcagtttttccc

SEQ ID NO: 4482 - RNA, 22 nt, Homo sapiens
  source 1..22: mol_type = genomic RNA
gggaaaaactgcaattaccttt

SEQ ID NO: 4483 - RNA, 22 nt, Homo sapiens
  source 1..22: mol_type = genomic RNA
ttctggataacatgctgaagct

SEQ ID NO: 4484 - RNA, 22 nt, Homo sapiens
  source 1..22: mol_type = genomic RNA
agcttcagcatgttatccagaa

SEQ ID NO: 4485 - RNA, 22 nt, Homo sapiens
  source 1..22: mol_type = genomic RNA
acgtttgaatgctgtacaaggc

SEQ ID NO: 4486 - RNA, 22 nt, Homo sapiens
  source 1..22: mol_type = genomic RNA
gccttgtacagcattcaaacgt

SEQ ID NO: 4487 - RNA, 20 nt, Homo sapiens
  source 1..20: mol_type = genomic RNA
atgagcgactgtgcctgacc

SEQ ID NO: 4488 - RNA, 20 nt, Homo sapiens
  source 1..20: mol_type = genomic RNA
ggtcaggcacagtcgctcat

SEQ ID NO: 4489 - RNA, 19 nt, Homo sapiens
  source 1..19: mol_type = genomic RNA
gagccagttggacaggagc

SEQ ID NO: 4490 - RNA, 19 nt, Homo sapiens
  source 1..19: mol_type = genomic RNA
gctcctgtccaactggctc

SEQ ID NO: 4491 - RNA, 23 nt, Homo sapiens
  source 1..23: mol_type = genomic RNA
ttcatttggtataaaccgcgatt

SEQ ID NO: 4492 - RNA, 23 nt, Homo sapiens
  source 1..23: mol_type = genomic RNA
aatcgcggtttataccaaatgaa

SEQ ID NO: 4493 - RNA, 22 nt, Homo sapiens
  source 1..22: mol_type = genomic RNA
ttgagaatgatgaatcattagg

SEQ ID NO: 4494 - RNA, 22 nt, Homo sapiens
  source 1..22: mol_type = genomic RNA
cctaatgattcatcattctcaa

SEQ ID NO: 4495 - RNA, 23 nt, Homo sapiens
  source 1..23: mol_type = genomic RNA
ttacagttgttcaaccagttact

SEQ ID NO: 4496 - RNA, 23 nt, Homo sapiens
  source 1..23: mol_type = genomic RNA
agtaactggttgaacaactgtaa

SEQ ID NO: 4497 - RNA, 21 nt, Homo sapiens
  source 1..21: mol_type = genomic RNA
caaagaggaaggtcccattac

SEQ ID NO: 4498 - RNA, 21 nt, Homo sapiens
  source 1..21: mol_type = genomic RNA
gtaatgggaccttcctctttg

SEQ ID NO: 4499 - RNA, 22 nt, Homo sapiens
  source 1..22: mol_type = genomic RNA
tcagttccaggccaaccaggct

SEQ ID NO: 4500 - RNA, 22 nt, Homo sapiens
  source 1..22: mol_type = genomic RNA
agcctggttggcctggaactga

SEQ ID NO: 4501 - RNA, 22 nt, Homo sapiens
  source 1..22: mol_type = genomic RNA
ttatggtttgcctgggactgag

SEQ ID NO: 4502 - RNA, 22 nt, Homo sapiens
  source 1..22: mol_type = genomic RNA
ctcagtcccaggcaaaccataa

SEQ ID NO: 4503 - RNA, 19 nt, Homo sapiens
  source 1..19: mol_type = genomic RNA
tgggcgtatctgtatgcta

SEQ ID NO: 4504 - RNA, 19 nt, Homo sapiens
  source 1..19: mol_type = genomic RNA
tagcatacagatacgccca

SEQ ID NO: 4505 - RNA, 20 nt, Homo sapiens
  source 1..20: mol_type = genomic RNA
agaccatgggttctcattgt

SEQ ID NO: 4506 - RNA, 20 nt, Homo sapiens
  source 1..20: mol_type = genomic RNA
acaatgagaacccatggtct

SEQ ID NO: 4507 - RNA, 22 nt, Homo sapiens
  source 1..22: mol_type = genomic RNA
ttgtgtcaatatgcgatgatgt

SEQ ID NO: 4508 - RNA, 22 nt, Homo sapiens
  source 1..22: mol_type = genomic RNA
acatcatcgcatattgacacaa

SEQ ID NO: 4509 - RNA, 19 nt, Homo sapiens
  source 1..19: mol_type = genomic RNA
tgtctctgctggggtttct

SEQ ID NO: 4510 - RNA, 19 nt, Homo sapiens
  source 1..19: mol_type = genomic RNA
agaaaccccagcagagaca

SEQ ID NO: 4511 - RNA, 25 nt, Homo sapiens
  source 1..25: mol_type = genomic RNA
aggcaccagccaggcattgctcagc

SEQ ID NO: 4512 - RNA, 25 nt, Homo sapiens
  source 1..25: mol_type = genomic RNA
gctgagcaatgcctggctggtgcct

SEQ ID NO: 4513 - RNA, 21 nt, Homo sapiens
  source 1..21: mol_type = genomic RNA
gaagtgtgccgtggtgtgtct

SEQ ID NO: 4514 - RNA, 21 nt, Homo sapiens
  source 1..21: mol_type = genomic RNA
agacacaccacggcacacttc

SEQ ID NO: 4515 - RNA, 21 nt, Homo sapiens
  source 1..21: mol_type = genomic RNA
aagcctgcccggctcctcggg

SEQ ID NO: 4516 - RNA, 21 nt, Homo sapiens
  source 1..21: mol_type = genomic RNA
cccgaggagccgggcaggctt

SEQ ID NO: 4517 - RNA, 20 nt, Homo sapiens
  source 1..20: mol_type = genomic RNA
gttgtgtcagtttatcaaac

SEQ ID NO: 4518 - RNA, 20 nt, Homo sapiens
  source 1..20: mol_type = genomic RNA
gtttgataaactgacacaac

SEQ ID NO: 4519 - RNA, 22 nt, Homo sapiens
  source 1..22: mol_type = genomic RNA
tggtctaggattgttggaggag

SEQ ID NO: 4520 - RNA, 22 nt, Homo sapiens
  source 1..22: mol_type = genomic RNA
ctcctccaacaatcctagacca

SEQ ID NO: 4521 - RNA, 22 nt, Homo sapiens
  source 1..22: mol_type = genomic RNA
cacacactgcaattacttttgc

SEQ ID NO: 4522 - RNA, 22 nt, Homo sapiens
  source 1..22: mol_type = genomic RNA
gcaaaagtaattgcagtgtgtg

SEQ ID NO: 4523 - RNA, 25 nt, Homo sapiens
  source 1..25: mol_type = genomic RNA
aggggtggtgttgggacagctccgt

SEQ ID NO: 4524 - RNA, 25 nt, Homo sapiens
  source 1..25: mol_type = genomic RNA
acggagctgtcccaacaccacccct

SEQ ID NO: 4525 - RNA, 21 nt, Homo sapiens
  source 1..21: mol_type = genomic RNA
tgagctaaatgtgtgctggga

SEQ ID NO: 4526 - RNA, 21 nt, Homo sapiens
  source 1..21: mol_type = genomic RNA
tcccagcacacatttagctca

SEQ ID NO: 4527 - RNA, 23 nt, Homo sapiens
  source 1..23: mol_type = genomic RNA
gcgaggacccctcggggtctgac

SEQ ID NO: 4528 - RNA, 23 nt, Homo sapiens
  source 1..23: mol_type = genomic RNA
gtcagaccccgaggggtcctcgc

SEQ ID NO: 4529 - RNA, 25 nt, Homo sapiens
  source 1..25: mol_type = genomic RNA
gctgggcagggcttctgagctcctt

SEQ ID NO: 4530 - RNA, 25 nt, Homo sapiens
  source 1..25: mol_type = genomic RNA
aaggagctcagaagccctgcccagc

SEQ ID NO: 4531 - RNA, 20 nt, Homo sapiens
  source 1..20: mol_type = genomic RNA
gggaaaaggaagggggagga

SEQ ID NO: 4532 - RNA, 20 nt, Homo sapiens
  source 1..20: mol_type = genomic RNA
tcctcccccttccttttccc

SEQ ID NO: 4533 - RNA, 20 nt, Homo sapiens
  source 1..20: mol_type = genomic RNA
gcggaaggcggagcggcgga

SEQ ID NO: 4534 - RNA, 20 nt, Homo sapiens
  source 1..20: mol_type = genomic RNA
tccgccgctccgccttccgc

SEQ ID NO: 4535 - RNA, 18 nt, Homo sapiens
  source 1..18: mol_type = genomic RNA
gtgaaggcccggcggaga

SEQ ID NO: 4536 - RNA, 18 nt, Homo sapiens
  source 1..18: mol_type = genomic RNA
tctccgccgggccttcac

SEQ ID NO: 4537 - RNA, 19 nt, Homo sapiens
  source 1..19: mol_type = genomic RNA
tgagggagtgggtgggagg

SEQ ID NO: 4538 - RNA, 19 nt, Homo sapiens
  source 1..19: mol_type = genomic RNA
cctcccacccactccctca

SEQ ID NO: 4539 - RNA, 19 nt, Homo sapiens
  source 1..19: mol_type = genomic RNA
actggaattggagtcaaaa

SEQ ID NO: 4540 - RNA, 19 nt, Homo sapiens
  source 1..19: mol_type = genomic RNA
ttttgactccaattccagt

SEQ ID NO: 4541 - RNA, 19 nt, Homo sapiens
  source 1..19: mol_type = genomic RNA
tgagggagttgggtgtata

SEQ ID NO: 4542 - RNA, 19 nt, Homo sapiens
  source 1..19: mol_type = genomic RNA
tatacacccaactccctca

SEQ ID NO: 4543 - RNA, 19 nt, Homo sapiens
  source 1..19: mol_type = genomic RNA
tgagggagtggattgtatg

SEQ ID NO: 4544 - RNA, 19 nt, Homo sapiens
  source 1..19: mol_type = genomic RNA
catacaatccactccctca

SEQ ID NO: 4545 - RNA, 19 nt, Homo sapiens
  source 1..19: mol_type = genomic RNA
ggctggtcagatgggagtg

SEQ ID NO: 4546 - RNA, 19 nt, Homo sapiens
  source 1..19: mol_type = genomic RNA
cactcccatctgaccagcc

SEQ ID NO: 4547 - RNA, 19 nt, Homo sapiens
  source 1..19: mol_type = genomic RNA
agcagggctggggattgca

SEQ ID NO: 4548 - RNA, 19 nt, Homo sapiens
  source 1..19: mol_type = genomic RNA
tgcaatccccagccctgct

SEQ ID NO: 4549 - RNA, 19 nt, Homo sapiens
  source 1..19: mol_type = genomic RNA
tgagggaggaggttgggta

SEQ ID NO: 4550 - RNA, 19 nt, Homo sapiens
  source 1..19: mol_type = genomic RNA
tacccaacctcctccctca

SEQ ID NO: 4551 - RNA, 19 nt, Homo sapiens
  source 1..19: mol_type = genomic RNA
tgaggtggtaggatgtaga

SEQ ID NO: 4552 - RNA, 19 nt, Homo sapiens
  source 1..19: mol_type = genomic RNA
tctacatcctaccacctca

SEQ ID NO: 4553 - RNA, 22 nt, Homo sapiens
  source 1..22: mol_type = genomic RNA
tccgagcctgggtctccctctt

SEQ ID NO: 4554 - RNA, 22 nt, Homo sapiens
  source 1..22: mol_type = genomic RNA
aagagggagacccaggctcgga

SEQ ID NO: 4555 - RNA, 22 nt, Homo sapiens
  source 1..22: mol_type = genomic RNA
gggggtccccggtgctcggatc

SEQ ID NO: 4556 - RNA, 22 nt, Homo sapiens
  source 1..22: mol_type = genomic RNA
gatccgagcaccggggaccccc

SEQ ID NO: 4557 - RNA, 22 nt, Homo sapiens
  source 1..22: mol_type = genomic RNA
agtcattggagggtttgagcag

SEQ ID NO: 4558 - RNA, 22 nt, Homo sapiens
  source 1..22: mol_type = genomic RNA
ctgctcaaaccctccaatgact

SEQ ID NO: 4559 - RNA, 19 nt, Homo sapiens
  source 1..19: mol_type = genomic RNA
cagcaggaggtgaggggag

SEQ ID NO: 4560 - RNA, 19 nt, Homo sapiens
  source 1..19: mol_type = genomic RNA
ctcccctcacctcctgctg

SEQ ID NO: 4561 - RNA, 22 nt, Homo sapiens
  source 1..22: mol_type = genomic RNA
actcaaaacccttcagtgactt

SEQ ID NO: 4562 - RNA, 22 nt, Homo sapiens
  source 1..22: mol_type = genomic RNA
aagtcactgaagggttttgagt

SEQ ID NO: 4563 - RNA, 22 nt, Homo sapiens
  source 1..22: mol_type = genomic RNA
agacttcccatttgaaggtggc

SEQ ID NO: 4564 - RNA, 22 nt, Homo sapiens
  source 1..22: mol_type = genomic RNA
gccaccttcaaatgggaagtct

SEQ ID NO: 4565 - RNA, 23 nt, Homo sapiens
  source 1..23: mol_type = genomic RNA
aaactctacttgtccttctgagt

SEQ ID NO: 4566 - RNA, 23 nt, Homo sapiens
  source 1..23: mol_type = genomic RNA
actcagaaggacaagtagagttt

SEQ ID NO: 4567 - RNA, 21 nt, Homo sapiens
  source 1..21: mol_type = genomic RNA
ggctagcaacagcgcttacct

SEQ ID NO: 4568 - RNA, 21 nt, Homo sapiens
  source 1..21: mol_type = genomic RNA
aggtaagcgctgttgctagcc

SEQ ID NO: 4569 - RNA, 21 nt, Homo sapiens
  source 1..21: mol_type = genomic RNA
acagtctgctgaggttggagc

SEQ ID NO: 4570 - RNA, 21 nt, Homo sapiens
  source 1..21: mol_type = genomic RNA
gctccaacctcagcagactgt

SEQ ID NO: 4571 - RNA, 23 nt, Homo sapiens
  source 1..23: mol_type = genomic RNA
atcccttgcaggggctgttgggt

SEQ ID NO: 4572 - RNA, 23 nt, Homo sapiens
  source 1..23: mol_type = genomic RNA
acccaacagcccctgcaagggat

SEQ ID NO: 4573 - RNA, 22 nt, Homo sapiens
  source 1..22: mol_type = genomic RNA
gtgagtctctaagaaaagagga

SEQ ID NO: 4574 - RNA, 22 nt, Homo sapiens
  source 1..22: mol_type = genomic RNA
tcctcttttcttagagactcac

SEQ ID NO: 4575 - RNA, 21 nt, Homo sapiens
  source 1..21: mol_type = genomic RNA
tctagtaagagtggcagtcga

SEQ ID NO: 4576 - RNA, 21 nt, Homo sapiens
  source 1..21: mol_type = genomic RNA
tcgactgccactcttactaga

SEQ ID NO: 4577 - RNA, 22 nt, Homo sapiens
  source 1..22: mol_type = genomic RNA
atgctgacatatttactagagg

SEQ ID NO: 4578 - RNA, 22 nt, Homo sapiens
  source 1..22: mol_type = genomic RNA
cctctagtaaatatgtcagcat

SEQ ID NO: 4579 - RNA, 22 nt, Homo sapiens
  source 1..22: mol_type = genomic RNA
gttctcccaacgtaagcccagc

SEQ ID NO: 4580 - RNA, 22 nt, Homo sapiens
  source 1..22: mol_type = genomic RNA
gctgggcttacgttgggagaac

SEQ ID NO: 4581 - RNA, 21 nt, Homo sapiens
  source 1..21: mol_type = genomic RNA
tgggtttacgttgggagaact

SEQ ID NO: 4582 - RNA, 21 nt, Homo sapiens
  source 1..21: mol_type = genomic RNA
agttctcccaacgtaaaccca

SEQ ID NO: 4583 - RNA, 19 nt, Homo sapiens
  source 1..19: mol_type = genomic RNA
gtgtctgcttcctgtggga

SEQ ID NO: 4584 - RNA, 19 nt, Homo sapiens
  source 1..19: mol_type = genomic RNA
tcccacaggaagcagacac

SEQ ID NO: 4585 - RNA, 23 nt, Homo sapiens
  source 1..23: mol_type = genomic RNA
ctaatagtatctaccacaataaa

SEQ ID NO: 4586 - RNA, 23 nt, Homo sapiens
  source 1..23: mol_type = genomic RNA
tttattgtggtagatactattag

SEQ ID NO: 4587 - RNA, 23 nt, Homo sapiens
  source 1..23: mol_type = genomic RNA
tgtgcttgctcgtcccgcccgca

SEQ ID NO: 4588 - RNA, 23 nt, Homo sapiens
  source 1..23: mol_type = genomic RNA
tgcgggcgggacgagcaagcaca

SEQ ID NO: 4589 - RNA, 25 nt, Homo sapiens
  source 1..25: mol_type = genomic RNA
agggatcgcgggcgggtggcggcct

SEQ ID NO: 4590 - RNA, 25 nt, Homo sapiens
  source 1..25: mol_type = genomic RNA
aggccgccacccgcccgcgatccct

SEQ ID NO: 4591 - RNA, 21 nt, Homo sapiens
  source 1..21: mol_type = genomic RNA
atgatccaggaacctgcctct

SEQ ID NO: 4592 - RNA, 21 nt, Homo sapiens
  source 1..21: mol_type = genomic RNA
agaggcaggttcctggatcat

SEQ ID NO: 4593 - RNA, 19 nt, Homo sapiens
  source 1..19: mol_type = genomic RNA
agtgtggctttcttagagc

SEQ ID NO: 4594 - RNA, 19 nt, Homo sapiens
  source 1..19: mol_type = genomic RNA
gctctaagaaagccacact

SEQ ID NO: 4595 - RNA, 19 nt, Homo sapiens
  source 1..19: mol_type = genomic RNA
tctaggctggtactgctga

SEQ ID NO: 4596 - RNA, 19 nt, Homo sapiens
  source 1..19: mol_type = genomic RNA
tcagcagtaccagcctaga

SEQ ID NO: 4597 - RNA, 19 nt, Homo sapiens
  source 1..19: mol_type = genomic RNA
aagcagctgcctctgaggc

SEQ ID NO: 4598 - RNA, 19 nt, Homo sapiens
  source 1..19: mol_type = genomic RNA
gcctcagaggcagctgctt

SEQ ID NO: 4599 - RNA, 21 nt, Homo sapiens
  source 1..21: mol_type = genomic RNA
gtggctgcactcacttccttc

SEQ ID NO: 4600 - RNA, 21 nt, Homo sapiens
  source 1..21: mol_type = genomic RNA
gaaggaagtgagtgcagccac

SEQ ID NO: 4601 - RNA, 21 nt, Homo sapiens
  source 1..21: mol_type = genomic RNA
aggaggcagcgctctcaggac

SEQ ID NO: 4602 - RNA, 21 nt, Homo sapiens
  source 1..21: mol_type = genomic RNA
gtcctgagagcgctgcctcct

SEQ ID NO: 4603 - RNA, 21 nt, Homo sapiens
  source 1..21: mol_type = genomic RNA
aatggcgccactagggttgtg

SEQ ID NO: 4604 - RNA, 21 nt, Homo sapiens
  source 1..21: mol_type = genomic RNA
cacaaccctagtggcgccatt

SEQ ID NO: 4605 - RNA, 25 nt, Homo sapiens
  source 1..25: mol_type = genomic RNA
caaccctaggagagggtgccattca

SEQ ID NO: 4606 - RNA, 25 nt, Homo sapiens
  source 1..25: mol_type = genomic RNA
tgaatggcaccctctcctagggttg

SEQ ID NO: 4607 - RNA, 22 nt, Homo sapiens
  source 1..22: mol_type = genomic RNA
ataatacatggttaacctcttt

SEQ ID NO: 4608 - RNA, 22 nt, Homo sapiens
  source 1..22: mol_type = genomic RNA
aaagaggttaaccatgtattat

SEQ ID NO: 4609 - RNA, 21 nt, Homo sapiens
  source 1..21: mol_type = genomic RNA
aatattatacagtcaacctct

SEQ ID NO: 4610 - RNA, 21 nt, Homo sapiens
  source 1..21: mol_type = genomic RNA
agaggttgactgtataatatt

SEQ ID NO: 4611 - RNA, 25 nt, Homo sapiens
  source 1..25: mol_type = genomic RNA
ggcggagggaagtaggtccgttggt

SEQ ID NO: 4612 - RNA, 25 nt, Homo sapiens
  source 1..25: mol_type = genomic RNA
accaacggacctacttccctccgcc

SEQ ID NO: 4613 - RNA, 24 nt, Homo sapiens
  source 1..24: mol_type = genomic RNA
tgcctgggtctctggcctgcgcgt

SEQ ID NO: 4614 - RNA, 24 nt, Homo sapiens
  source 1..24: mol_type = genomic RNA
acgcgcaggccagagacccaggca

SEQ ID NO: 4615 - RNA, 22 nt, Homo sapiens
  source 1..22: mol_type = genomic RNA
aggcggggcgccgcgggaccgc

SEQ ID NO: 4616 - RNA, 22 nt, Homo sapiens
  source 1..22: mol_type = genomic RNA
gcggtcccgcggcgccccgcct

SEQ ID NO: 4617 - RNA, 22 nt, Homo sapiens
  source 1..22: mol_type = genomic RNA
ggtggcccggccgtgcctgagg

SEQ ID NO: 4618 - RNA, 22 nt, Homo sapiens
  source 1..22: mol_type = genomic RNA
cctcaggcacggccgggccacc

SEQ ID NO: 4619 - RNA, 20 nt, Homo sapiens
  source 1..20: mol_type = genomic RNA
accaggaggctgaggcccct

SEQ ID NO: 4620 - RNA, 20 nt, Homo sapiens
  source 1..20: mol_type = genomic RNA
aggggcctcagcctcctggt

SEQ ID NO: 4621 - RNA, 20 nt, Homo sapiens
  source 1..20: mol_type = genomic RNA
gtccctgagtgtatgtggtg

SEQ ID NO: 4622 - RNA, 20 nt, Homo sapiens
  source 1..20: mol_type = genomic RNA
caccacatacactcagggac

SEQ ID NO: 4623 - RNA, 21 nt, Homo sapiens
  source 1..21: mol_type = genomic RNA
tccggttctcagggctccacc

SEQ ID NO: 4624 - RNA, 21 nt, Homo sapiens
  source 1..21: mol_type = genomic RNA
ggtggagccctgagaaccgga

SEQ ID NO: 4625 - RNA, 23 nt, Homo sapiens
  source 1..23: mol_type = genomic RNA
aggaagccctggaggggctggag

SEQ ID NO: 4626 - RNA, 23 nt, Homo sapiens
  source 1..23: mol_type = genomic RNA
ctccagcccctccagggcttcct

SEQ ID NO: 4627 - RNA, 20 nt, Homo sapiens
  source 1..20: mol_type = genomic RNA
ctgtatgccctcaccgctca

SEQ ID NO: 4628 - RNA, 20 nt, Homo sapiens
  source 1..20: mol_type = genomic RNA
tgagcggtgagggcatacag

SEQ ID NO: 4629 - RNA, 23 nt, Homo sapiens
  source 1..23: mol_type = genomic RNA
tggtgcggagagggcccacagtg

SEQ ID NO: 4630 - RNA, 23 nt, Homo sapiens
  source 1..23: mol_type = genomic RNA
cactgtgggccctctccgcacca

SEQ ID NO: 4631 - RNA, 22 nt, Homo sapiens
  source 1..22: mol_type = genomic RNA
caactagactgtgagcttctag

SEQ ID NO: 4632 - RNA, 22 nt, Homo sapiens
  source 1..22: mol_type = genomic RNA
ctagaagctcacagtctagttg

SEQ ID NO: 4633 - RNA, 23 nt, Homo sapiens
  source 1..23: mol_type = genomic RNA
aaggagcttacaatctagctggg

SEQ ID NO: 4634 - RNA, 23 nt, Homo sapiens
  source 1..23: mol_type = genomic RNA
cccagctagattgtaagctcctt

SEQ ID NO: 4635 - RNA, 22 nt, Homo sapiens
  source 1..22: mol_type = genomic RNA
gggacccagggagagacgtaag

SEQ ID NO: 4636 - RNA, 22 nt, Homo sapiens
  source 1..22: mol_type = genomic RNA
cttacgtctctccctgggtccc

SEQ ID NO: 4637 - RNA, 22 nt, Homo sapiens
  source 1..22: mol_type = genomic RNA
gcagagtgcaaacaattttgac

SEQ ID NO: 4638 - RNA, 22 nt, Homo sapiens
  source 1..22: mol_type = genomic RNA
gtcaaaattgtttgcactctgc

SEQ ID NO: 4639 - RNA, 20 nt, Homo sapiens
  source 1..20: mol_type = genomic RNA
cggctctgggtctgtgggga

SEQ ID NO: 4640 - RNA, 20 nt, Homo sapiens
  source 1..20: mol_type = genomic RNA
tccccacagacccagagccg

SEQ ID NO: 4641 - RNA, 22 nt, Homo sapiens
  source 1..22: mol_type = genomic RNA
gcagcagggtgaaactgacaca

SEQ ID NO: 4642 - RNA, 22 nt, Homo sapiens
  source 1..22: mol_type = genomic RNA
tgtgtcagtttcaccctgctgc

SEQ ID NO: 4643 - RNA, 21 nt, Homo sapiens
  source 1..21: mol_type = genomic RNA
tggaggagaaggaaggtgatg

SEQ ID NO: 4644 - RNA, 21 nt, Homo sapiens
  source 1..21: mol_type = genomic RNA
catcaccttccttctcctcca

SEQ ID NO: 4645 - RNA, 23 nt, Homo sapiens
  source 1..23: mol_type = genomic RNA
tctgctcataccccatggtttct

SEQ ID NO: 4646 - RNA, 23 nt, Homo sapiens
  source 1..23: mol_type = genomic RNA
agaaaccatggggtatgagcaga

SEQ ID NO: 4647 - RNA, 23 nt, Homo sapiens
  source 1..23: mol_type = genomic RNA
tgcaccatggttgtctgagcatg

SEQ ID NO: 4648 - RNA, 23 nt, Homo sapiens
  source 1..23: mol_type = genomic RNA
catgctcagacaaccatggtgca

SEQ ID NO: 4649 - RNA, 23 nt, Homo sapiens
  source 1..23: mol_type = genomic RNA
ctgggatctccggggtcttggtt

SEQ ID NO: 4650 - RNA, 23 nt, Homo sapiens
  source 1..23: mol_type = genomic RNA
aaccaagaccccggagatcccag

SEQ ID NO: 4651 - RNA, 22 nt, Homo sapiens
  source 1..22: mol_type = genomic RNA
tgagacctctgggttctgagct

SEQ ID NO: 4652 - RNA, 22 nt, Homo sapiens
  source 1..22: mol_type = genomic RNA
agctcagaacccagaggtctca

SEQ ID NO: 4653 - RNA, 23 nt, Homo sapiens
  source 1..23: mol_type = genomic RNA
tccagtaccacgtgtcagggcca

SEQ ID NO: 4654 - RNA, 23 nt, Homo sapiens
  source 1..23: mol_type = genomic RNA
tggccctgacacgtggtactgga

SEQ ID NO: 4655 - RNA, 22 nt, Homo sapiens
  source 1..22: mol_type = genomic RNA
ggagactgatgagttcccggga

SEQ ID NO: 4656 - RNA, 22 nt, Homo sapiens
  source 1..22: mol_type = genomic RNA
tcccgggaactcatcagtctcc

SEQ ID NO: 4657 - RNA, 21 nt, Homo sapiens
  source 1..21: mol_type = genomic RNA
gcaggaacttgtgagtctcct

SEQ ID NO: 4658 - RNA, 21 nt, Homo sapiens
  source 1..21: mol_type = genomic RNA
aggagactcacaagttcctgc

SEQ ID NO: 4659 - RNA, 22 nt, Homo sapiens
  source 1..22: mol_type = genomic RNA
ctgccctggcccgagggaccga

SEQ ID NO: 4660 - RNA, 22 nt, Homo sapiens
  source 1..22: mol_type = genomic RNA
tcggtccctcgggccagggcag

SEQ ID NO: 4661 - RNA, 21 nt, Homo sapiens
  source 1..21: mol_type = genomic RNA
cctggaaacactgaggttgtg

SEQ ID NO: 4662 - RNA, 21 nt, Homo sapiens
  source 1..21: mol_type = genomic RNA
cacaacctcagtgtttccagg

SEQ ID NO: 4663 - RNA, 22 nt, Homo sapiens
  source 1..22: mol_type = genomic RNA
tatacctcagttttatcaggtg

SEQ ID NO: 4664 - RNA, 22 nt, Homo sapiens
  source 1..22: mol_type = genomic RNA
cacctgataaaactgaggtata

SEQ ID NO: 4665 - RNA, 22 nt, Homo sapiens
  source 1..22: mol_type = genomic RNA
tggtggtttacaaagtaattca

SEQ ID NO: 4666 - RNA, 22 nt, Homo sapiens
  source 1..22: mol_type = genomic RNA
tgaattactttgtaaaccacca

SEQ ID NO: 4667 - RNA, 22 nt, Homo sapiens
  source 1..22: mol_type = genomic RNA
tggatttctttgtgaatcacca

SEQ ID NO: 4668 - RNA, 22 nt, Homo sapiens
  source 1..22: mol_type = genomic RNA
tggtgattcacaaagaaatcca

SEQ ID NO: 4669 - RNA, 21 nt, Homo sapiens
  source 1..21: mol_type = genomic RNA
tcctcttctccctcctcccag

SEQ ID NO: 4670 - RNA, 21 nt, Homo sapiens
  source 1..21: mol_type = genomic RNA
ctgggaggagggagaagagga

SEQ ID NO: 4671 - RNA, 20 nt, Homo sapiens
  source 1..20: mol_type = genomic RNA
gtagaggagatggcgcaggg

SEQ ID NO: 4672 - RNA, 20 nt, Homo sapiens
  source 1..20: mol_type = genomic RNA
ccctgcgccatctcctctac

SEQ ID NO: 4673 - RNA, 22 nt, Homo sapiens
  source 1..22: mol_type = genomic RNA
gtgaacgggcgccatcccgagg

SEQ ID NO: 4674 - RNA, 22 nt, Homo sapiens
  source 1..22: mol_type = genomic RNA
cctcgggatggcgcccgttcac

SEQ ID NO: 4675 - RNA, 22 nt, Homo sapiens
  source 1..22: mol_type = genomic RNA
gactgacacctctttgggtgaa

SEQ ID NO: 4676 - RNA, 22 nt, Homo sapiens
  source 1..22: mol_type = genomic RNA
ttcacccaaagaggtgtcagtc

SEQ ID NO: 4677 - RNA, 21 nt, Homo sapiens
  source 1..21: mol_type = genomic RNA
tactcaaaaagctgtcagtca

SEQ ID NO: 4678 - RNA, 21 nt, Homo sapiens
  source 1..21: mol_type = genomic RNA
tgactgacagctttttgagta

SEQ ID NO: 4679 - RNA, 21 nt, Homo sapiens
  source 1..21: mol_type = genomic RNA
ttaatatcggacaaccattgt

SEQ ID NO: 4680 - RNA, 21 nt, Homo sapiens
  source 1..21: mol_type = genomic RNA
acaatggttgtccgatattaa

SEQ ID NO: 4681 - RNA, 22 nt, Homo sapiens
  source 1..22: mol_type = genomic RNA
atccgcgctctgactctctgcc

SEQ ID NO: 4682 - RNA, 22 nt, Homo sapiens
  source 1..22: mol_type = genomic RNA
ggcagagagtcagagcgcggat

SEQ ID NO: 4683 - RNA, 20 nt, Homo sapiens
  source 1..20: mol_type = genomic RNA
gtgagtcagggtggggctgg

SEQ ID NO: 4684 - RNA, 20 nt, Homo sapiens
  source 1..20: mol_type = genomic RNA
ccagccccaccctgactcac

SEQ ID NO: 4685 - RNA, 22 nt, Homo sapiens
  source 1..22: mol_type = genomic RNA
tgcccttaaaggtgaacccagt

SEQ ID NO: 4686 - RNA, 22 nt, Homo sapiens
  source 1..22: mol_type = genomic RNA
actgggttcacctttaagggca

SEQ ID NO: 4687 - RNA, 22 nt, Homo sapiens
  source 1..22: mol_type = genomic RNA
tcttctctgttttggccatgtg

SEQ ID NO: 4688 - RNA, 22 nt, Homo sapiens
  source 1..22: mol_type = genomic RNA
cacatggccaaaacagagaaga

SEQ ID NO: 4689 - RNA, 22 nt, Homo sapiens
  source 1..22: mol_type = genomic RNA
aaattattgtacatcggatgag

SEQ ID NO: 4690 - RNA, 22 nt, Homo sapiens
  source 1..22: mol_type = genomic RNA
ctcatccgatgtacaataattt

SEQ ID NO: 4691 - RNA, 22 nt, Homo sapiens
  source 1..22: mol_type = genomic RNA
ttcaacgggtatttattgagca

SEQ ID NO: 4692 - RNA, 22 nt, Homo sapiens
  source 1..22: mol_type = genomic RNA
tgctcaataaatacccgttgaa

SEQ ID NO: 4693 - RNA, 22 nt, Homo sapiens
  source 1..22: mol_type = genomic RNA
ctatacaacttactactttccc

SEQ ID NO: 4694 - RNA, 22 nt, Homo sapiens
  source 1..22: mol_type = genomic RNA
gggaaagtagtaagttgtatag

SEQ ID NO: 4695 - RNA, 22 nt, Homo sapiens
  source 1..22: mol_type = genomic RNA
tgaggtagtaagttgtattgtt

SEQ ID NO: 4696 - RNA, 22 nt, Homo sapiens
  source 1..22: mol_type = genomic RNA
aacaatacaacttactacctca

SEQ ID NO: 4697 - DNA, 3131 bp, Adeno-associated virus
  source 1..3131: mol_type = genomic DNA
gcggccgcgaattcgcccttggctgcgtcaactggaccaatgagaactttcccttcaatgattgcgtcgacaagatggtgatctggtgggaggagggcaagatgacggccaaggtcgtggagtccgccaaggccattctcggcggcagcaaggtgcgcgtggaccaaaagtgcaagtcgtccgcccagatcgaccccacccccgtgatcgtcacctccaacaccaacatgtgcgccgtgattgacgggaacagcaccaccttcgagcaccagcagcctctccaggaccggatgtttaagttcgaactcacccgccgtctggagcacgactttggcaaggtgacaaagcaggaagtcaaagagttcttccgctgggccagtgatcacgtgaccgaggtggcgcatgagttttacgtcagaaagggcggagccagcaaaagacccgcccccgatgacgcggataaaagcgagcccaagcgggcctgcccctcagtcgcggatccatcgacgtcagacgcggaaggagctccggtggactttgccgacaggtaccaaaacaaatgttctcgtcacgcgggcatgcttcagatgctgtttccctgcaaaacgtgcgagagaatgaatcggaatttcaacatttgcttcacacacggggtcagagactgctcagagtgtttccccggcgtgtcagaatctcaaccggtcgtcagaaagaggacgtatcggaaactccgtgcgattcatcatctgctggggcgggctcccgagattgcttgctcggcctgcgatctggtcaacgtggacctggatgactgtgtttctgagcaataaatgacttaaaccaggtatggctgccgatggttatcttccagattggctcgaggacaacctctctgagggcattcgcgagtggtgggcgctgaaacctggagccccgaagcccaaagccaaccagcaaaagcaggacgacggccggggtctggtgcttcctggctacaagtacctcggacccttcaacggactcgacaagggggagcccgtcaacgcggcggacgcagcggccctcgagcacgacaaggcttacgaccagcagctgcaggcgggtgacaatccgtacctgcggtataaccacgccgacgccgagtttcaggagcgtctgcaagaagatacgtcttttgggggcaacctcgggcgagcagtcttccaggccaagaagcgggttctcgaacctctcggtctggttgaggaaggcgctaagacggctcctggaaagaagagaccggtagagccatcaccccagcgttctccagactcctctacgggcatcggcaagaaaggccaacagcccgccagaaaaagactcaattttggtcagactggcgactcagagtcagttccagaccctcaacctctcggagaacctccagcagcgccctctggtgtgggacctaatacaatggctgcaggcggtggcgcaccaatggcagacaataacgaaggcgccgacggagtgggtagttcctcgggaaattggcattgcgattccacatggctgggcgacagagtcatcaccaccagcacccgaacctgggccctgcccacctacaacaaccacctctacaagcaaatctccaacgggacatcgggaggagccaccaacgacaacacctacttcggctacagcaccccctgggggtattttgactttaacagattccactgccacctttcaccacgtgactggcagcgactcatcaacaacaactggggattccgacccaagagactcagcttcaagctcttcaacatccaggtcaaggaggtcacgcagaatgaaggcaccaagaccatcgccaataacctcaccagcaccatccaggtgtttacggactcggagtaccagctgccgtacgttctcggctctgtccaccagggctgcctgcctccgttcccggcggacgtgttcatgattccccagtacggctacctaacactcaacaacggtagtcaggccgtgggacgctcctccttctactgcctggaatactttccttcgcagatgctgagaaccggcaacaacttccagtttacttacaccttcgaggacgtgcctttccacagcagctacgcccacagctagagcttggaccggctgatgaatcctctgattgaccagtacctgtactacttgtctcggactcaaacaacaggaggcacggcaaatacgcagactctgggcttcagccaaggtgggcctaatacaatggccaatcaggcaaagaactggctgccaggaccctgttaccgccaacaacgcgtctcaacgacaaccgggcaaaacaacaatagcaactttgcctggactgctgggaccaaataccatctgaatggaagaaattcattggctaatcctggcatcgctatggcaacacacaaagacgacgaggagcgtttttttcccagtaacgggatcctgatttttggcaaacaaaatgctgccagagacaatgcggattacagcgatgtcatgctcaccagcgaggaagaaatcaaaaccactaaccctgtggctacagaggaatacggtatcgtggcagataacttgcagcagcaaaacacggctcctcaaattggaactgtcaacagccagggggccttacccggtatggtctggcagaaccgggacgtgtacctgcagggtcccatctgggccaagattcctcacacggacggcaacttccacccgtctccgctgatgggcggctttggcctgaaacatcctccgcctcagatcctgatcaagaacacgcctgtacctgcggatcctccgaccaccttcaaccagtcaaagctgaactctttcatcacgcaatacagcaccggacaggtcagcgtggaaattgaatgggagctgcagaaggaaaacagcaagcgctggaaccccgagatccagtacacctccaactactacaaatctataagtgtggactttgctgttaatacagaaggcgtgtactctgaaccccgccccattggcacccgttacctcacccgtaatctgtaattgcctgttaatcaataaaccggttgattcgtttcagttgaactttggtctctgcgaagggcgaattc

SEQ ID NO: 4698 - protein, 728 aa, Adeno-associated virus
MAADGYLPDWLEDNLSEGIREWWDLKPGAPKPKANQQKQDDGRGLVLPGYKYLGPFNGLDKGEPVNEADAAALEHDKAYDKQLEQGDNPYLKYNHADAEFQERLQEDTSFGGNLGRAVFQAKKRVLEPLGLVEEGAKTAPGKKRPIESPDSSTGIGKKGQQPAKKKLNFGQTGDSESVPDPQPLGEPPAAPSGLGSGTMAAGGGAPMADNNEGADGVGNASGNWHCDSTWLGDRVITTSTRTWALPTYNNHLYKQISSQSGATNDNHFFGYSTPWGYFDFNRFHCHFSPRDWQRLINNNWGFRPRKLRFKLFNIQVKEVTTNDGVTTIANNLTSTIQVFSDSEYQLPYVLGSAHQGCLPPFPADVFMIPQYGYLTLNNGSQSMGRSSFYCLEYFPSQMLRTGNNFEFSYTFEEVPFHSSYAHSQSLDRLMNPLIDQYLYYLARTQSTTGSTRELQFHQAGPNTMAEQSKNWLPGPCYRQQRLSKNIDSNNNSNFAWTGATKYHLNGRNSLTNPGVAMATNKDDEGQFFPINGVLVFGKTGAANKTTLENVLMTSEEEIKTTNPVATEEYGVVSSNLQSSTAGPQTQTVNSQGALPGMVWQNRDVYLQGPIWAKIPHTDGNFHPSPLMGGFGLKHPPPQILIKNTPVPANPPGVFTPALFASFITQYSTGQVSVEIEWELQKENSKRWNPEIQYTSNYAKSNNVEFAVNNEGVYTEPRPIGTRYLTRNL

SEQ ID NO: 4699 - protein, 644 aa, Adeno-associated virus
KAYDQQLKAGDNPYLRYNHADAEFQERLQEDTSFGGNLGRAVFQAKKRVLEPLGLVETPAKTAPGKKRPVDSPDSTSGIGKKGQQPAKKRLNFGQTGDSESVPDPQPIGEPPAGPSGLGSGTMAAGGGAPMADNNEGADGVGNASGNWHCDSTWLGDRVITTSTRTWALPTYNNHLYKQISSQSAGSTNDNVYFGYSTPWGYFDFNRFHCHFSPRDWQRLINNNWGFRPKKLNFKLFNIQVKEVTTNDGVTTIANNLTSTVQVFSDSEYQLPYVLGSAHQGCLPPFPADVFMIPQYGYLTLNNGSQSVGRSSFYCLEYFPSQMLRTGNNFTFSYTFEDVPFHSSYAHSQSLDRLMNPLIDQYLYYLARTQSNAGGTAGNRELQFYQGGPTTMAEQAKNWLPGPCFRQQRVSKTLDQNNNSNFAWTGATKYHLNXRNSLVNPGVAMATHKDDEERFFPSSGVLIFGKTGAANKTTLENVLMTNEEEIRPTNPVATEEYGIVSSNLQAASTAAQTQVVNNQGALPGMVWQNRDVYLQGPIWAKIPHTDGNFHPSPLMGGFGLKHPPPQILIKNTPVPANPPEVFTPAKFASFITQYSTGQVSVEIEWELQKENSKRWNPEIQYTSNFDKQTGVDFAVDSQGVYSEP

SEQ ID NO: 4700 - DNA, 1933 bp, Adeno-associated virus
  source 1..1933: mol_type = genomic DNA
caaggcctacgaccagcagctcaaagcgggtgacaatccgtacctgcggtataaccacgccgacgccgagtttcaggagtgtcttcaagaagatacgtcttttgggggcaacctcgggcgagcagtcttccaggccaaaaagcgggttctcgaacctcttggtctggttgagacgccagctaagacggcacctggaaagaagcgaccggtagactcgccagactccacctcgggcatcggcaagaaaggccagcagcccgcgaaaaagagactcaactttgggcagactggcgactcagagtcagtccccgaccctcaaccaatcggagaaccaccagcaggcccctctggtctgggatctggtacaatggttgcaggcggtggcgcaccaatggctgacaataacgagggcgccgacggagtgggtaatgcctcaggaaattggcattgcgattccacatggctgggcgacagagtcatcaccaccagcacccgaacctgggccctgcccacctacaacaaccacctctacaagcaaatctccagtcagtcagcagggagcaccaacgataacgtctatttcggctacagcaccccctgggggtattttgacttcaacagattccattgccacttctcaccacgtgactggcagcgacttatcaacaacaactggggattccggcccaagaagctcaacttcaagctcttcaacatccaggtcaaggaggtcacgacgaatgacggtgtcacaaccatcgctaataaccttaccagcacggttcaggtcttttcggactcggaatatcaactgccgtacgtcctcggctccgcgcaccagggctgcctgcctccgttcccggcagacgtgttcatgattccgcagtacggatacctgactctgaacaatggcagccaatcggtaggccgttcctccttctactgcctggagtactttccttctcagatgctgagaacgggcaacaacttcacctttagctacaccttcgaggacgtgcctttccacagcagctacgcgcacagccagagtctggaccggctgatgaatcccctcatcgaccagtacctgtactacttggccagaacacagagcaacgcaggaggtactgctggcaatcgggaactgcagttttatcagggcggacctaccaccatggccgaacaagcaaagaactggctgcccggaccttgcttccggcaacagagagtatccaagacgctggatcaaaataacaacagcaactttgcctggactggtgccacaaaataccatttaaatggaagaaattcattggttaatcccggtgtcgccatggcaacccacaaggacgacgaggaacgcttctccccttcgagcggagttctaatttttggcaaaactggagcagctaataaaactacattagaaaacgtgctcatgacaaatgaagaagaaattcgtcctaccaacccggtagctaccgaggaatacgggattgtaagcagcaacttgcaggcggctagcaccgcagcccagacacaagttgttaacaaccagggagccttacctggcatggtctggcagaaccgggacgtgtacctgcaaggtcccatttgggccaagattcctcacacggacggcaactttcacccgtctcctctaatgggtggctttggactgaaacacccgcctccccagatcctgatcaaaaacacgccggtacctgctaatcctccagaagtgtttactcctgccaagtttgcttccttcatcacgcagtacagcaccgggcaagtcagcgttgagatcgagtgggagctgcagaaagagaacagcaagcgctggaacccagagattcagtacacctccaactttgacaaacagactggagtggactttgctgttgacagccagggtgtttactctgagcct

SEQ ID NO: 4701 - protein, 644 aa, Adeno-associated virus
KAYDQQLKAGDNPYLRYNHADAEFQECLQEDTSFGGNLGRAVFQAKKRVLEPLGLVETPAKTAPGKKRPVDSPDSTSGIGKKGQQPAKKRLNFGQTGDSESVPDPQPIGEPPAGPSGLGSGTMVAGGGAPMADNNEGADGVGNASGNWHCDSTWLGDRVITTSTRTWALPTYNNHLYKQISSQSAGSTNDNVYFGYSTPWGYFDFNRFHCHFSPRDWQRLINNNWGFRPKKLNFKLFNIQVKEVTTNDGVTTIANNLTSTVQVFSDSEYQLPYVLGSAHQGCLPPFPADVFMIPQYGYLTLNNGSQSVGRSSFYCLEYFPSQMLRTGNNFTFSYTFEDVPFHSSYAHSQSLDRLMNPLIDQYLYYLARTQSNAGGTAGNRELQFYQGGPTTMAEQAKNWLPGPCFRQQRVSKTLDQNNNSNFAWTGATKYHLNGRNSLVNPGVAMATHKDDEERFSPSSGVLIFGKTGAANKTTLENVLMTNEEEIRPTNPVATEEYGIVSSNLQAASTAAQTQVVNNQGALPGMVWQNRDVYLQGPIWAKIPHTDGNFHPSPLMGGFGLKHPPPQILIKNTPVPANPPEVFTPAKFASFITQYSTGQVSVEIEWELQKENSKRWNPEIQYTSNFDKQTGVDFAVDSQGVYSEP

SEQ ID NO: 4702 - DNA, 1933 bp, Adeno-associated virus
  source 1..1933: mol_type = genomic DNA
caaggcctacgaccagcagctcaaagcgggtgacaatccgtacctgcggtataaccacgccgacgccgagtttcaggagcgtcttcaagaagatacgtcttttgggggcaacctcgggcgagcagtcttccaggccaaaaagcgggttctcgaacctcttggtctggttgagacgccagctaagacggcacctggaaagaagcgaccggtagactcgccagactccacctcgggcatcggcaagaaaggccagcagcccgcgaaaaagagactcaactttgggcagactggcgactcagagccagtccccgaccctcaaccaatcggagaaccaccagcaggcccctctggtctgggatctggtacaatggctgcaggcggtggcgcaccaatggctgacaataacgagggcgccgacggagtgggtaatgcctcaggaaattggcattgcgattccacacggctgggcgacagagtcatcaccaccagcacccgaacctgggccctgcccacctacaacaaccacctctacaagcaaatctccagtcagtcagcagggagcaccaacgataacgtctatttcggctacagcaccccctgggggtattttgacttcaacagattccattgccacttctcaccacgtgactggcagcgacttatcaacaacaactggggattccggcccaagaagctcaacttcaagctcttcaacatccaggtcaaggaggtcacgacgaatgacggcgtcacaaccatcgctaataaccttaccagcacggttcaggtcttttcggactcggaatatcaactgccgtacgtcctcggctccgcgcaccagggctgcctgcctccgttcccggcagacgtgttcatgattccgcagtacggatacctgactctgaacaatggcagccaatcggtaggccgttcctccttctactgcctggagtactttccttctcagatgctgagaacgggcaacaacttcacctttagctacaccttcgaggacgtgcctttccacagcagctacgcgcacagccagagtctgggccggctgatgaatcccctcatcgaccagtacctgtactacttggccagaacacagagcaacgcaggaggtactgctggcaatcgggaactgcagttttatcagggcggacctaccaccatggccgaacaagcaaagaactggctgcccggaccttgcttccggcaacagagagtatccaagacgctggatcaaaataacaacagcaactttgcctggactggtgccacaaaataccatttaaatggaagaaattcattggttaatcccggtgtcgccatggcaacccacaaggacgacgaggaacgcttcttcccttcgagcggagttctaatttttggcaaaactggagcagctaataaaactacattagaaaacgtgctcatgacaaatgaagaagaaattcgtcctaccaacccggtagctaccgaggaatacgggattgtaagcagcaacttgcaggcggctagcaccgcagcccagacacaagttgttaacaaccagggagccttacctggcatggtctggcagaaccgggacgtgtacctgcaaggtcccatttgggccaagattcctcacacggacggcaactttcacccgtctcctctaatgggtggctttggactgaaacacccgcctccccagatcctgatcaaaaacacaccggtacctgctaatcctccagaagtgtttactcctgccaagtttgcttccttcatcacgcagtacagcaccgggcaagtcagcgttgagatcgaatgggagctgcagaaagagaacagcaagcgctggaacccagagattcagtacacctccaactttgacaaacagactggagtggactttgctgttgacagccagggtgtttactctgagcct

SEQ ID NO: 4703 - protein, 644 aa, Adeno-associated virus
KAYDQQLKAGDNPYLRYNHADAEFQERLQEDTSFGGNLGRAVFQAKKRVLEPLGLVETPAKTAPGKKRPVDSPDSTSGIGKKGQQPAKKRLNFGQTGDSEPVPDPQPIGEPPAGPSGLGSGTMAAGGGAPMADNNEGADGVGNASGNWHCDSTRLGDRVITTSTRTWALPTYNNHLYKQISSQSAGSTNDNVYFGYSTPWGYFDFNRFHCHFSPRDWQRLINNNWGFRPKKLNFKLFNIQVKEVTTNDGVTTIANNLTSTVQVFSDSEYQLPYVLGSAHQGCLPPFPADVFMIPQYGYLTLNNGSQSVGRSSFYCLEYFPSQMLRTGNNFTFSYTFEDVPFHSSYAHSQSLGRLMNPLIDQYLYYLARTQSNAGGTAGNRELQFYQGGPTTMAEQAKNWLPGPCFRQQRVSKTLDQNNNSNFAWTGATKYHLNGRNSLVNPGVAMATHKDDEERFFPSSGVLIFGKTGAANKTTLENVLMTNEEEIRPTNPVATEEYGIVSSNLQAASTAAQTQVVNNQGALPGMVWQNRDVYLQGPIWAKIPHTDGNFHPSPLMGGFGLKHPPPQILIKNTPVPANPPEVFTPAKFASFITQYSTGQVSVEIEWELQKENSKRWNPEIQYTSNFDKQTGVDFAVDSQGVYSEP

SEQ ID NO: 4704 - DNA, 1933 bp, Adeno-associated virus; identical to SEQ ID NO: 4702
  source 1..1933: mol_type = genomic DNA

SEQ ID NO: 4705 - protein, 644 aa, Adeno-associated virus; identical to SEQ ID NO: 4703

SEQ ID NO: 4706 - DNA, 1933 bp, Adeno-associated virus
  source 1..1933: mol_type = genomic DNA
caaggcctacgaccagcagctcaaagcgggtgacaatccgtacctgcggtataaccacgccgacgccgagtttcaggagcgtcttcaagaagatacgtcttttgggggcaacctcgggcgagcagtcttccaggccaaaaagcgggttctcgaacctcttggtctggttgagacgccagctaagacggcacctggaaagaagcgaccggtagactcgccagactccacctcgggcatcggcaagaaaggccagcagcccgcgaaaaagagactcaactttgggcagactggcgactcagagtcagtccccgaccctcaaccaatcggagaaccaccagcaggcccctctggtctgggatctggtacaatggctgcaggcggtggcgcaccaatggctgacaatagcgagggcgccgacggagtgggtaatgcctcaggaaattggcattgcgattccacatggctgggcgacagagtcatcaccaccagcacccgaacctgggccctgcccacctacaacaaccacctctacaagcaaatctccagtcagtcagcagggagcaccaacgataacgtctatttcggctacagcaccccctgggggtattttgacttcaacagattccattgccacttctcaccacgtgactggcagcgacttatcaacaacaactggggattccggcccaagaagctcaacttcaagctcttcaacatccaggtcaaggaggtcacgacgaatgacggtgtcacaaccatcgctaataaccttaccagcacggttcaggtcttttcggactcggaatatcaactgccgtacgtcctcggctccgcgcaccagggctgcctgcctccgttcccggcagacgtgttcatgattccgcagtacggatacctgactctgaacaatggcagccaatcggtaggccgttcctccttctactgcctggagtactttccttctcagatgctgagaacgggcaacaacttcacctttagctacaccttcgaggacgtgcctttccacagcagctacgcgcacagccagagtctggaccggctgatgaatcccctcatcgaccagtacctgtactacttggccagaacacagagcaacgcaggaggtactgctggcaatcgggaactgcagttttatcagggcggacctaccaccatggccgaacaagcaaagaactggctgcccggaccttgcttccggcaacagagagtatccaagacgctggatcaaaataacaacagcaactttgcctggactggtgccacaaaataccatttaaatggaagaaattcattggttaatcccggtgtcgccatggcaacccacaaggacgacgaggaacgcttcttcccttcgagcggagttctaatttttggcaaaactggagcagctaataaaactacattagaaaacgtgctcatgacaaatgaagaagaaattcgtcctaccaacccggtagctaccgaggaatacgggattgtaagcagcaacttgcaggcggctagcaccgcagcccagacacaagttgttaacaaccagggagccttacctggcatggtctggcagaaccgggacgtgtacctgcaaggtcccatttgggccaagattcctcacacggacggcaactttcacccgtctcctctaatgggtggctttggactgaaacacccgcctccccagatcctgatcaaaaacacaccggtacctgctaatcctccagaagtgtttactcctgccaagcttgcttccttcatcacgcagtacagcaccgggcaagtcagcgttgagatcgagtgggagctgcagaaagagaacagcaagcgctggaacccagagattcagtacacctccaactttgacaaacagactggagtggactttgctgttgacagccagggtgtttactctgagcct

SEQ ID NO: 4707 - protein, 644 aa, Adeno-associated virus
KAYDQQLKAGDNPYLRYNHADAEFQERLQEDTSFGGNLGRAVFQAKKRVLEPLGLVETPAKTAPGKKRPVDSPDSTSGIGKKGQQPAKKRLNFGQTGDSESVPDPQPIGEPPAGPSGLGSGTMAAGGGAPMADNSEGADGVGNASGNWHCDSTWLGDRVITTSTRTWALPTYNNHLYKQISSQSAGSTNDNVYFGYSTPWGYFDFNRFHCHFSPRDWQRLINNNWGFRPKKLNFKLFNIQVKEVTTNDGVTTIANNLTSTVQVFSDSEYQLPYVLGSAHQGCLPPFPADVFMIPQYGYLTLNNGSQSVGRSSFYCLEYFPSQMLRTGNNFTFSYTFEDVPFHSSYAHSQSLDRLMNPLIDQYLYYLARTQSNAGGTAGNRELQFYQGGPTTMAEQAKNWLPGPCFRQQRVSKTLDQNNNSNFAWTGATKYHLNGRNSLVNPGVAMATHKDDEERFFPSSGVLIFGKTGAANKTTLENVLMTNEEEIRPTNPVATEEYGIVSSNLQAASTAAQTQVVNNQGALPGMVWQNRDVYLQGPIWAKIPHTDGNFHPSPLMGGFGLKHPPPQILIKNTPVPANPPEVFTPAKLASFITQYSTGQVSVEIEWELQKENSKRWNPEIQYTSNFDKQTGVDFAVDSQGVYSEP

SEQ ID NO: 4708 - DNA, 1933 bp, Adeno-associated virus
  source 1..1933: mol_type = genomic DNA
caaggcctacgaccagcagctcaaagcgggtgacaatccgtacctgcggtataaccacgccgacgccgagtttcaggagcgtcttcaagaagatacgtcttttgggggcaacctcgggcgagcagtcttccaggccaaaaagcgggttctcgaacctcttggtctggttgagacgccagctaagacggcacctggaaagaagcgaccggtagactcgccagactccacctcgggcatcggcaagaaaggccagcagcccgcgaaaaagagactcaactttgggcagactggcgactcagagtcagtccccgaccctcaaccaatcggagaaccaccagcaggcccctctggtctgggatctggtacaatggctgcaggcggtggcgcaccaatggctgacaataacgagggcgccgacggagtgggtaatgcctcaggaaattggcattgcgattccacatggctgggcgacagagtcatcaccaccagcacccgaacctgggccctgcccacctacaacaaccacctctacaagcaaatctccagtcagtcagcagggagcaccaacgataacgtctatttcggctacagcaccccctgggggtattttgacttcaacagattccattgccacttctcaccacgtgactggcagcgacttatcaacaacaactggggattccggcccaagaagctcaacttcaagctcttcaacatccaggtcaaggaggtcacgacgaatgacggcgtcacaaccatcgctaataaccttaccagcacggttcaggtcttttcggacccggaatatcaactgccgtacgtcctcggctccgcgcaccagggctgcctgcctccgttcccggcagacgtgttcatgattccgcagtacggatacctgactctgaacaatggcagccaatcggtaggccgttcctccttctactgcctggagtactttccttctcagatgctgagaacgggcaacaacttcacctttagctacaccttcgaggacgtgcctttccacagcagctacgcgcacagccagagtctggaccggctgatgaatcccctcatcgaccagtacctgtactacttggccagaacacagagcaacgcaggaggtactgctggcaatcgggaactgcagttttatcagggcggacctaccaccatggccgaacaagcaaagaactggctgcccggaccttgcttccggcaacagagagtatccaagacgctggatcaaaataacaacagcaactttgcctggactggtgccacaaaataccatttaaatggaagaaattcattggttaatcccggtgtcgccatggcaacccacaaggacgacgaggaacgcttcttcccttcgagcggagttctaatttttggcaaaactggagcagctaataaaactacattagaaaacgtgctcatgacaaatgaagaagaaattcgtcctaccaacccggtagctaccgaggaatacgggattgtaagcagcaacttgcaggcggctagcaccgcagcccagacacaagttgttaacaaccagggagccttacctggcatggtctggcagaaccgggacgtgtacctgcaaggtcccatttgggccaagattcctcacacggacggcaactttcacccgtctcctctaatgggtggctttggactgaaacacccgcctccccagatcctgatcaaaaacacaccggtacctgctaatcctccagaagtgtttactcctgccaagattgcttccttcatcacgcagtacagcaccgggcaagtcagcgttgagatcgagtgggagctgcagaaagagaacagcaagcgctggaacccagagattcagtacacctccaactttgacaaacagactggagtggactttgctgttgacagccagggtgtttactctgagcct

SEQ ID NO: 4709 - protein, 644 aa, Adeno-associated virus
KAYDQQLKAGDNPYLRYNHADAEFQERLQEDTSFGGNLGRAVFQAKKRVLEPLGLVETPAKTAPGKKRPVDSPDSTSGIGKKGQQPAKKRLNFGQTGDSESVPDPQPIGEPPAGPSGLGSGTMAAGGGAPMADNNEGADGVGNASGNWHCDSTWLGDRVITTSTRTWALPTYNNHLYKQISSQSAGSTNDNVYFGYSTPWGYFDFNRFHCHFSPRDWQRLINNNWGFRPKKLNFKLFNIQVKEVTTNDGVTTIANNLTSTVQVFSDPEYQLPYVLGSAHQGCLPPFPADVFMIPQYGYLTLNNGSQSVGRSSFYCLEYFPSQMLRTGNNFTFSYTFEDVPFHSSYAHSQSLDRLMNPLIDQYLYYLARTQSNAGGTAGNRELQFYQGGPTTMAEQAKNWLPGPCFRQQRVSKTLDQNNNSNFAWTGATKYHLNGRNSLVNPGVAMATHKDDEERFFPSSGVLIFGKTGAANKTTLENVLMTNEEEIRPTNPVATEEYGIVSSNLQAASTAAQTQVVNNQGALPGMVWQNRDVYLQGPIWAKIPHTDGNFHPSPLMGGFGLKHPPPQILIKNTPVPANPPEVFTPAKIASFITQYSTGQVSVEIEWELQKENSKRWNPEIQYTSNFDKQTGVDFAVDSQGVYSEP

SEQ ID NO: 4710 - protein, 728 aa, Adeno-associated virus
MAADGYLPDWLEDNLSEGIREWWDLKPGAPKPKANQQKQDDGRGLVLPGYKYLRPFNGLDKGEPVNEADAAALEHDKAYDKQLEQGDNPYLKYNHADAEFQERLQEDTSFGGNLGRAVFQAKKRVLEPLGLVEEVAKTAPGKKRPIESPDSSTGIGKKGQQPAKKKLNFGQTGDSESVPDPQPLGEPPAAPSGLGSGTMAAGGGAPMADNNEGADGVGNASGNWHCDSTWLGDRVITTSTRTWALPTYNNHLYKQISSQSGATNDNHFFSYSTPWGYFDFNRFHCHFSPRDWQRLINNNWGFRPRKLRFKLFNIQVKEVTTNDGVTTIANNLTSTIQVFSDSEYQLPYVLGSAHQGCLPPFPADVFMIPQYGYLTLNNGSQSVGRSSFYCLEYFPSQMLRTGNNFEFSYTFEEVPFHSSYVHSQSLDRLMNPLIDQYLYYLARTQSTTGSTRELQFHQAGPNTMAEQSKNWLPGPCYRQQRLSKNIDSNNNSNFAWTGATKYHLNGRNSLTNPGVAMATNKDDEDQFFPINGVLVFGKTGAANKTTLENVLMTSEEEIKTTNPVATEEYGVVSSNLQSSTAGPQTQTVNSQGALPGMVWQNRDVCLQGPIWAKIPHTDGNFHPSPLMGGFGLKHPPPQILIKNTPVPANPPEVFTPAKFASFITQYSTGQVSVEIEWELQKENSKRWNPEIQYTSNYAKSNNVEFAVNNEGVYTEPRPIGTRYLTRNL

SEQ ID NO: 4711 - protein, 728 aa, Adeno-associated virus
MAADGYLPDWLEDNLSEGIREWWDLKPGAPKPKANQQKQDDGRGLVLPGYKYLGPFNGLDKGEPVNEADAAALEHDKAYDKQLEQGDNPYLKYNHADAEFQERLQEDTSFGGNLGRAVFQAKKRVLEPLGLVEEGAKTASGKKRPIESPDSSTGIGKKGQQPAKKKLNFGQTGDSESVPDPQPLGEPPAAPSGLGSGTMAAGGGAPMADNNEGADGVGNASGNWHCDSTWLGDRVITTSTRTWALPTYNNHLYKQISSQSGATNDNHFFGYSTPWGYFDFNRFHCHFSPRDWQRLINNNWGFRPRKLRFKLFNIQVKEVTTNDGVTTIANNLTSTIQVFSDSEYQLPYVLGSAHQGCLPPFPADVFMIPQYGYLTLNNGSQSVGRSSFCCLEYFPSQMLRTGNNFEFSYTFEEVPFHSSYAHSQSLDRLMNPLIDQYLYYLARTQSTTGSTRELQFHQAGPNTVAEQSKNWLPGPCYRQQRLSKNIDSNNNSNFAWTGATKYHLNGRNSLTNPGVAMATNKDDEDQFLPINGVLVFGKTGAANKTTLENVLMTSEEEIKTTNPVATEEYGVVSSNLQSSTAGPRTQTVNSQGALPGMVWQNRDVYLQGPIWAEIPHTDGNFHPSPLMGGFGLKHPPPQILIKNTPVPANPPEVFTPAKFASFITQYSTGQVSVEIEWELQKENSKRWNPEIQYTSNYAKSNNVEFAVNNEGVYTEPRPIGTRYLTRNL

SEQ ID NO: 4712 - protein, 738 aa, Adeno-associated virus
MAADGYLPDWLEDNLSEGIREWWALKPGAPKPKANQQKQDDGRGLVLPGYKYLGPFNGLDKGEPVNAADAAALEHDKAYDQQLKAGDNPYLRYNHADAEFQERLQEDTSFGGNLGRAVFQAKKRVLEPLGLVEEGAKTAPGKKRPVEPSPQRSPDSTTGIGKKGQQPAKKRLNFGQTGDSESVPDPQPIGEPPAGPSGLGSGTMAAGGGAPMADNNEGADGVGSSSGNWHCDSTWLGDRVITTSTRTWALPTYNNHLYKQISNGTSGGSTNDNTYFGYSTPWGYFDFNRFHCHFSPRDWQRLINNNWGFRPKRLNFKLFNIQVKEVTQNEGTKTIANNLTSTIQVFTDSEYQLPYVLGSARQGCLPPFPADVFMIPQYGYLTLNNGSQAVGRSSFYCLEYFPSQMLRTGNNFEFSYQFEDVPFHSSYAHSQSLDRLMNPLIDQYLYYLSRTQSTGGTAGTQQLLFSQAGPNNMSAQAKNWLPGPCYRQQRVSTTLSQNNNSNFAWTGATKYHLNGRDSLVNPGVAMATHKDDEERFFPSSGVLMFGKQGAGKGNVDYSSVMLTSEEEIKTTNPVATEQYGVVADNLQQQNAAPIVGAVNSQGALPGMVWQNRDVYLQGPIWAKIPHTDGNFHPSPLMGGFGLKHPPPQILIKNTPVPADPPTTFSQAKLASFITQYSTGQVSVEIEWELQKENSKRWNPEIQYTSNYYKSTNVDFAVNTDGTYSEPRPIGTRYLTRNL

SEQ ID NO: 4713 - DNA, 3121 bp, Adeno-associated virus
  source 1..3121: mol_type = genomic DNA
gaattcgcccttcgcagagaccaaagttcaactgaaacgaatcaaccggtttattgattaacaagcaattacagattacgggtgaggtaacgggtgccgatggggcgaggctcagaataagtgccatctgtgttaacagcaaagtccacatttgtagatttgtagtagttggaagtgtattgaatctctgggttccagcgtttgctgttttctttctgcagctcccattcaatttccacgctgacctgtccggtgctgtactgcgtgatgaacgacgccagcttagcttgactgaaggtagttggaggatccgcgggaacaggtgtattcttaatcaggatctgaggaggcgggtgtttcagtccaaagccccccatcagcggcgagggatgaaagtttccgtccgtgtgaggaatcttggcccagataggaccctgcaggtacacgtcccggttctgccagaccatgccaggtaaggctccttgactgttgacggcccctacaataggagcggcgttttgctgttgcaggttatcggccaccacgccgtactgttctgtggccactgggttggtggttttaatttcttcctcactggttagcataacgctgctatagtccacgttgccttttccagctccctgtttcccaaacattaagactccgctggacggaaaaaatcgctcttcgtcgtccttgtgggttgccatagcgacaccgggatttaccagagagtctctgccattcagatgatacttggtggcaccggtccaggcaaagttgctgttgttattttgcgacagtgtcgtggagacgcgttgctgccggtagcagggcccgggtagccagtttttggcctgagccgacatgttattaggcccggcctgagaaaatagcaactgctgagttcctgcggtacctcccgtggactgagtccgagacaggtagtacaggtactggtcgatgagggggttcatcagccggtccaggctttggctgtgcgcgtagctgctgtgaaaaggcacgtcctcaaactggtagctgaactcaaagttgttgcccgttctcagcatttgagaaggaaagtactccaggcagtagaaggaggaacggcccacggcctgactgccattgttcagagtcaggtacccgtactgaggaatcatgaagacgtccgccgggaacggaggcaggcagccctggcgcgcagagccgaggacgtacgggagctggtattccgagtccgtaaagacctgaatcgtgctggtaaggttattggcgatggtcttggtgccttcattctgcgtgacctccttgacctggatgttgaagagcttgaagttgagtctcttgggccggaatccccagttgttgttgatgagtcgctgccagtcacgtggtgagaagtggcagtggaatctgttaaagtcaaaatacccccagggggtgctgtagccgaagtaggtgttgtcgttggtgcttcctcccgaagtcccgttggagatttgcttgtagaggtggttgttgtaggtggggagggcccaggttcgggtgctggtggtgatgactctgtcgcccagccatgtggaatcgcaatgccaatttcctgaggaactacccactccgtcggcgccttcgttattgtctgccattggagcgccaccgcctgcagccattgtaccagatcccagaccagaggggcctgcggggggttctccgattggttgagggtcgggcactgactctgagtcgccagtctgcccaaagttgagtctctttttcgcgggctgctggcctttcttgccgatgcccgtagtggagtctggagaacgctggggtgatggctctaccggtctcttctttccaggagccgtcttagcgccttcctcaaccagaccgagaggttcgagaacccgcttcttggcctggaagactgctcgtccgaggttgcccccaaaagacgtatcttcttgcagacgctcctgaaactcggcgtcggcgtggttataccgcaggtacggattgtcacccgctttgagctgctggtcgtaggccttgtcgtgctcgagggccgctgcgtccgccgcgttgacgggctcccccttgtcgagtccgttgaagggtccgaggtacttgtagccaggaagcaccagaccccggccgtcgtcctgcttttgctggttggctttgggcttcggggctccaggtttcagcgcccaccactcgcgaatgccctcagagaggttgtcctcgagccaatctggaagataaccatcggcagccatacctgatctaaatcatttattgttcaaagatgcagtcatccaaatccacattgaccagatcgcaggcagtgcaagcgtctggcacctttcccatgatatgatgaatgtagcacagtttctgatacgcctttttgacgacagaaacgggttgagattctgacacgggaaagcactctaaacagtctttctgtccgtgagtgaagcagatatttgaattctgattcattctctcgcattgtctgcagggaaacagcatcagattcatgcccacgtgacgagaacatttgttttggtacctgtccgcgtagttgatcgaagcttccgcgtctgacgtcgatggctgcgcaactgactcgcgcacccgtttgggctcacttatatctgcgtcactgggggcgggtcttttcttggctccaccctttttgacgtagaattcatgctccacctcaaccacgtgatcctttgcccaccggaaaaagtctttgacttcctgcttggtgaccttcccaaagtcatgatccagacggcgggtgagttcaaatttgaacatccggtcttgcaacggctgctggtgttcgaaggtcgttgagttcccgtcaatcacggcgcacatgttggtgttggaggtgacgatcacgggagtcgggtctatctgggccgaggacttgcatttctggtccacgcgcaccttgcttcctccgagaatggctttggccgactccacgaccttggcggtcatcttcccctcctcccaccagatcaccatcttgtcgacacagtcgttgaagggaaagttctcattggtccagttgacgcagccgtagaagggcgaattc

SEQ ID NO: 4714 - DNA, 3121 bp, Adeno-associated virus
  source 1..3121: mol_type = genomic DNA
gaattcgcccttctacggctgcgtcaactggaccaatgagaactttcccttcaacgactgtgtcgacaagatggtgatctggtgggaggaggggaagatgaccgccaaggtcgtggagtcggccaaagccattctcggaggaagcaaggtgcgcgtggaccagaaatgcaagtcctcggcccagatagacccgactcccgtgatcgtcacctccaacaccaacatgtgcgccgtgattgacgggaactcaacgaccttcgaacaccagcagccgttgcaagaccggatgttcaaatttgaactcacccgccgtctggatcatgactttgggaaggtcaccaagcaggaagtcaaagactttttccggtgggcaaaggatcacgtggttgaggtggagcacgaattctacgtcaaaaagggtggagccaagaaaagacccgcccccagtgacgcagatataagtgagcccaaacgggtgcgcgagtcagttgcgcagccatcgacgtcagacgcggaagcttcgatcaactacgcagacaggtaccaaaacaaatgttctcgtcacgcgggcatgaatctgatgctgtttccctgcagacaatgcgagagaatgaatcagaattcaaatatctgcttcactcacggacagaaagactgtttagagtgctttcccgtgtcagaatctcaacccgtttctgtcgtcaaaaaggcgtatcagaaactgtgctacattcatcatatcatgggaaaggtgccagacgcttgcactgcctgcgatctggtcgatgtggatttggatgactgcatctttgaacaataaatgatttaaatcaggtatggctgccgatggttatcttccagattggctcgaggacaacctctctgagggcattcgcgagtggtgggcgctgaaacctggagccccgaagcccaaagccaaccagcaaaagcaggacggcggccggggtctggtgcttcctggctacaagtacctcggacccttcaacggactcgacaagggggagcccgtcaacgcggcggacgcagcggccctcgagcacgacaaggcctacgaccagcagctcaaagcgggtgacaatccgtacctgcggtataaccacgccgacgccgagtttcaggagcgtctgcaagaagatacgtcttttgggggcaacctcgggcgagcagtcttccaggccaagaagcgggttctcgaacctctcggtctggttgaggaaggcgctaagacggctcctggaaagaagagaccggtagagccatcaccccagcgttctccagactcctctacgggcatcggcaagaaaggccagcagcccgcgaaaaagagactcaactttgggcagactggcgactcagagtcagtgcccgaccctcaaccaatcggagaaccccccgcaggcccctctggtctgggatctggtacaatggctgcaggcggtggcgctccaatggcagacaataacgaaggcgccgacggagtgggtagttcctcaggaaattggcattgcgattccacatggctgggcgactgagtcatcaccaccagcacccgaacctgggccctccccacctacaacaaccacctctacaagcaaatctccaacgggacttcgggaggaagcaccaacgacaacacctacttcggctacagcaccccctgggggtattttgactttaacagattccactgccacttctcaccacgtgactggcagcgactcatcaacaacaactggggattccggcccaagagactcaacttcaagctcttcaacatccaggtcaaggaggtcacgcagaatgaaggcaccaagaccatcgccaataaccttaccagcacgattcaggtctttacggactcggaataccagctcccgtacgtcctcggctctgcgcaccagggctgcctgcctccgttcccggcggacgtcttcatgattcctcagtacgggtacctgactctgaacaatggcagtcaggccgtgggccgttcctccttctactgcctggagtactttccttctcaaatgctgagaacgggcaacaactttgagttcagctaccagtttgaggacgtgccttttcacagcagctacgcgcacagccaaagcctggaccggctgatgaaccccctcatcgaccagtacctgtactacctgtctcggactcagtccacgggaggtaccgcaggaactcagcagttgctattttctcaggccgggcctaataacatgtcggctcaggccaaaaactggctacccgggccctgctaccggcagtaacgcgtctccacgacactgtcgcaaaataacaacagcaactttgtctggaccggtgccaccaagtatcatctgaatggcagagactctctggtagatcccggtgtcgctatggcaacccacaaggacgacgaagagcgattttttccgtccagcggagtcataatgtttgggaaacagggagctggaaaagacaacgtggactatagcagcgtcatgctaaccagtgaggaagaaattaaaaccaccaacccagtggccacagaacagtacggcgtggtggccgataacctgcaacagcaaaacgccgctcctattgtaggggccgtcaacagtcaaggagccttacctggcatggtctggcagaaccgggacgtgtacctgcagggtcctacctgggccaagattcctcacacggacggaaactttcatccctcgccgctgatgggaggctttggactgaaacacccgcctcctcagatcctgattaagaatacacctgttcccgcggatcctccaactaccttcagtcaagctaagctggcgtcgttcatcacgcagtacagcaccggacaggtcagcgtggaaattgaatgggagctgcaggaagaaaacagcaaacgctggaacccagagattcaatacacttccaactactacaaatctacaaatgtggactttgctgttaacacagatggcacttattctgagcctcgccccatcggcacccgttacctcacccgtaatctgtaattgcttgttaatcaataaaccggttgattcgtttcagttgaactttggtctctgcgaagggcgaattc

SEQ ID NO: 4715 - protein, 738 aa, Adeno-associated virus
MAADGYLPDWLEDNLSEGIREWWALKPGAPKPKANQQKQDDGRGLVLPGYKYLGPFNGLDKGEPVNAADAAALEHDKAYDQQLKAGDNPYLRYNHADAEFQERLQEDTSFGGNLGRAVFQAKKRVLEPLGLVEEGAKTAPGKKRPVEPSPQRSPDSSTGIGKKGQQPAKKRLNFGQTGDSESVPDPQPIGEPPAGPSGLGSGTMAAGGGAPMADNNEGADGVGSSSGNWHCDSTWLGDGVITTSTRTWALPTYNNHLYKQISNGTSGGSTNDNTYFGYSTPWGYFDFNRFHCHFSPRDWQRLINNNWGFRPKSLNFKLFNIQVKEVTQNEGTKTIANNLTSTIQVFTDSEYQLPYVLGSAHQGCLPPFPADVFMIPQYGYLTLNNGSQAVGRSSFYCLEYFPSQMLRTGNNFEFSYQFEDVPFHSSYAHSQSLDRLMNPLIDQYLYYLSRTQSTGGTAGTQQLLFSQAGPNNMSAQAKNWLPGPCYRQQRVSTTLSQNDNSNFAWTGATKYHLNGRDSLVNPGVAMATHKDDEERFFPSSGVLMFGKQGAGKDNVDYSSVMLTSEEEIKTTNPVATEQYGVVADNLQQQNAAPIVGAVNSQGALPGMVWQNRDVYLQGPIWAKIPHTDGNFHPSPLMGGFGLKHPPPQILIKNTPVPADPPTTFSQAKLASFITQYSTGQVSVEIEWELQKENSKRWNPEIQYTSNYYKSTNVDFAVNTDGTYSEPRPIGTRYLTRNL

SEQ ID NO: 4716 - DNA, 3121 bp, Adeno-associated virus
  source 1..3121: mol_type = genomic DNA
gaattcgcccttcgcgagaccaaagttcaactgaaacgaatcaaccggtttattgattaacaagcaattacagattacgggtgaggtaacgggtgccgatggggcgaggctcagaataagtgccatctgtgttaacagcaaagtccacatttgtagatttgtagtagttggaagtgtattgaatctctgggttccagcgtttgctgttttctttctgcagctcccattcaatttccacgctgacctgtccggtgctgtactgcgtgatgaacgacgccagcttagcttgactgaaggtagttggaggatccgcgggaacaggtgtattcttaatcaggatctgaggaggcgggtgtttcagtccaaagcctcccatcagcggcgagggatgaaagtttccgtccgtgtgaggaatcttggcccagataggaccctgcaggtacacgtcccggttctgccagaccatgccaggtaaggctccttgactgttgacggcccctacaataggagcggcgttttgctgttgcaggttatcggccaccacgccgtactgttctgtggccactgggttggtggttttaatttcttcctcactggttagcataacgctgctatagtccacgttgtcttttccagctccctgtttcccaaacattaagactccgctggacggaaaaaatcgctcttcgtcgtccttgtgggttgccatagcgacaccgggatttaccagagagtctctgccattcagatgatacttggtggcaccggtccaggcaaagttgctgttgtcattttgcgacagtgtcgtggagacgcgttgctgccggtagcagggcccgggtagccagtttttggcctgagccgacatgttattaggcccggcctgagaaaatagcaactgctgagttcctgcggtacctcccgtggactgagtccgagacaggtagtacaggtactggtcgatgagggggttcatcagccggtccaggctttggctgtgcgcgtagctgctgtgaaaaggcacgtcctcaaactggtagctgaactcaaagttgttgcccgttctcagcatttgagaaggaaagtactccaggcagtagaaggaggaacggcccacggcctgactgccattgttcagagtcaggtacccgtactgaggaatcatgaagacgtccgccgggaacggaggcaggcagccctggtgcgcagagccgaggacgtacgggagctggtattccgagtccgtaaagacctgaatcgtgctggtaaggttattggcgatggtcttggtgccttcattctgcgtgacctccttgacctggatgttgaagagcttgaagttgaggctcttgggccggaatccccagttgttgttgatgagtcgctgccagtcacgtggtgagaagtggcagtggaatctgttaaagtcaaaatacccccagggggtgctgtagccgaagtaggtgttgtcgttggtgcttcctcccgaagtcccgttggagatttgcttgtagaggtggttgttgtaggtggggagggcccaggttcgggtgctggtggtgatgactccgtcgcccagccatgtggaatcgcaatgccaatttcctgaggaactacccactccgtcggcgccttcgttattgtctgccattggagcgccaccgcctgcagccattgtaccagatcccagaccagaggggcctgcggggggttctccgattggttgagggtcgggcactgactctgagtcgccagtctgcccaaagttgagtctctttttcgcgggctgctggcctttcttgccgatgcccgtagaggagtctggagaacgctggggtgatggctctaccggtctcttctttccaggagccgtcttagcgccttcctcaaccagaccgagaggttcgagaacccgcttcttggcctggaagactgctcgcccgaggttgcccccaaaagacgtatcttcttgcagacgctcctgaaactcggcgtcggcgtggttataccgcaggtacggattgtcacccgctttgagctgctggtcgtaggccttgtcgtgctcgagggccgctgcgtccgccgcgttgacgggctcccccttgtcgagtccgttgaagggtccgaggtacttgtagccaggaagcaccagaccccggccgtcgtcctgcttttgctggttggctttgggcttcggggctccaggtttcagcgcccaccactcgcgaatgccctcagagaggttgtcctcgagccaatctggaagataaccatcggcagccatacctgatttaaatcatttattgttcaaagatgcagtcatccaaatccacattgaccagatcgcaggcagtgcaagcgtctggcacctttcccatgatatgatgaatgtagcacagtttctgatacgcctttttgacgacagaaacgggttgagattctgacacgggaaagcactctaaacagtctttctgtccgtgagtgaagcagatatttgaattctgattcattctctcgcattgtctgcagggaaacagcatcagattcatgcccacgtgacgagaacatttgttttggtacctgtctgcgtagttgatcgaagcttccgcgtctgacgtcgatggctgcgcaactgactcgcgcacccgtttgggctcacttatatctgcgtcactgggggcgggtcttttcttggctccaccctttttgacgtagaattcatgctccacctcaaccacgtgatcctttgcccaccggaaaaagtctttgacttcctgcttggtgaccttcccaaagtcatgatccagacggcgggtgagttcaaatttgaacatccggtcttgcaacggctgctggtgttcgaaggtcgttgagttcccgtcaatcacggcgcacatgttggtgttggaggtgacgatcacgggagtcgggtctatctgggccgaggacttgcatttctggtccacgcgcaccttgcttcctccgagaatggctttggccgactccacgaccttggcggtcatcttcccctcctcccaccagatcaccatcttgtcgacacagtcgttgaagggaaagttctcattggtccagttgacgcagccgtagaaagggcgaattc

SEQ ID NO: 4717 - DNA, 2211 bp, Adeno-associated virus
  source 1..2211: mol_type = genomic DNA
atggctgctgacggttatcttccagattggctcgaggacaacctttctgaaggcattcgtgagtggtgggctctgaaacctggagtccctcaacccaaagcgaaccaacaacaccaggacaaccgtcggggtcttgtgcttccgggttacaaatacctcggacccggtaacggactcgacaaaggagagccggtcaacgaggcggacgcggcagccctcgaacacgacaaagcttacgaccagcagctcaaggccggtgacaacccgtacctcaagtacaaccacgccgacgccgagtttcaggagcgtcttcaagaagatacgtcttttgggggcaaccttggcagagcagtcttccaggccaaaaagaggatccttgagcctcttggtctggttgaggaagcagctaaaacggctcctggaaagaagggggctgtagatcagtctcctcaggaaccggactcatcatctggtgttggcaaatcgggcaaacagcctgccagaaaaagactaaatttcggtcagactggagactcagagtcagtcccagaccctcaacctctcggagaaccaccagcagcccccacaagtttgggatctaatacaatggcttcaggcggtggcgcaccaatggcagacaataacgagggtgccgatggagtgggtaattcctcaggaaattggcattgcgattcccaatggctgggcgacagagtcatcaccaccagcaccagaacctgggccctgcccacttacaacaaccatctctacaagcaaatctccagccaatcaggagcttcaaacgacaaccactactttggctacagcaccccttgggggtattttgactttaacagattccactgccacttctcaccacgtgactggcagcgactcattaacaacaactggggattccggcccaagaaactcagcttcaagctcttcaacatccaagttagaggggtcacgcagaacgatggcacgacgactattgccaataaccttaccagcacggttcaagtgtttacggactcggagtatcagctcccgtacgtgctcgggtcggcgcaccaaggctgtctcccgccgtttccagcggacgtcttcatggtccctcagtatggatacctcaccctgaacaacggaagtcaagcggtgggacgctcatccttttactgcctggagtacttcccttcgcagatgctaaggactggaaataacttccaattcagctataccttcgaggatgtaccttttcacagcagctacgctcacagccagagtttggatcgcttgatgaatcctcttattgatcagtatctgtactacctgaacagaacgcaaggaacaacctctggaacaaccaaccaatcacggctgctttttagccaggctgggcctcagtctatgtctttgcaggccagaaattggctacctgggccctgctaccggcaacagagactttcaaagactgctaacgacaacaacaacagtaactttccttggacagcggccagcaaatatcatctcaatggccgcgactcgctggtgaatccaggaccagctatggccagtcacaaggacgatgaagaaaaatttttccctatgcacggcaatctaatatttggcaaagaagggacaacggcaagtaacgcagaattagataatgtaatgattacggatgaagaagagattcgtaccaccaatcctgtggcaacagagcagtatggaactgtggcaaataacttgcagagctcaaatacagctcccacgactggaactgtcaatcatcagggggccttacctggcatggtgtggcaagatcgtgacgtgtaccttcaaggacctatctgggcaaagattcctcacacggatggacactttcatccttctcctctgatgggaggctttggactgaaacatccgcctcctcaaatcatgatcaaaaatactccggtaccggcaaatcctccgacgactttcagcccggccaagtttgcttcatttatcactcagtactccactggacaggtcagcgtggaaattgagtgggagctacagaaagaaaacagcaaacgttggaatccagagattcagtacacttccaactacaacaagtctgttaatgtggactttactgtagacactaatggtgtttatagtgaacctcgccctattggaacccggtatctcacacgaaacttgtga

SEQ ID NO: 4718 - protein, 737 aa, Adeno-associated virus
MAADGYLPDWLEDNLSEGIREWWDLKPGAPKPKANQQKQDNGRGLVLPGYKYLGPFNGLDKGEPVNAADAAALEHDKAYDQQLNAGDNPYLRYNHADAEFQERLQEDTSFGGNLGRAVFQAKKRVLEPLGLVEEGAKTAPAKKRPVEPSPQRSPDSSTGIGKKGQQPARKRLNFGQTGDSESVPDPQPLGEPPAAPSSVGSGTVAAGGGAPMADNNEGADGVGNASGNWHCDSTWLGDRVITTSTRTWALPTYNNHLYEQISSETAGSTNDNTYFGYSTPWGYFDFNRFHCHFSPRDWQRLINNNWGFRPKKLRFKLFNIQVKEVTTNDGVTTIANNLTSTIQVFSDSEYQLPYVLGSAHQGCLPPFPADVFMIPQYGYLTLNNGSQSVGRSSFYCLEYFPSQMLRTGNNFEFSYSFEDVPFHSSYAHSQSLDRLMNPLIDQYLYYLARTQSDPGGTAGNRELQFYQGGPSTMAEQAKNWLPGPCFRQQRVSKTLDQNNNSNFAWTGATKYHLNGRNSLVNPGVAMATHKDDEDRFFPSSGVLIFGKTGATNKTTLENVLMTNEEEIRPTNPVATEEYGIVSSNLQAANTAAQTQVVNNQGALPGMVWQNRDVYLQGPIWAKIPHTDGNFHPSPLMGGFGLKHPPPQILIKNTPVPANPPEVFTPAKFASFITQYSTGQVSVEIEWELQKENSKRWDPEIQYTSNFEKQTGVDFAVDSQGVYSEPRPIGTRYLTRNL

SEQ ID NO: 4719 - DNA, 2211 bp, Adeno-associated virus
  source 1..2211: mol_type = genomic DNA
atggctgctgacggttatcttccagattggctcgaggacaacctttctgaaggcattcgtgagtggtgggctctgaaacctggagtccctcaacccaaagcgaaccaacaacaccaggacaaccgtcggggtcttgtgcttccgggttacaaatacctcggacccggtaacggactcgacaaaggagagccggtcaacgaggcggacgcggcagccctcgaacacgacaaagcttacgaccagcagctcaaggccggtgacaacccgtacctcaagtacaaccacgccgacgccgagtttcaggagcgtcttcaagaagatacgtcttttgggggcaaccttggcagagcagtcttccaggccaaaaagaggatccttgagcctcttggtctggttgaggaagcagctaaaacggctcctggaaagaagggggctgtagatcagtctcctcaggaaccggactcatcatctggtgttggcaaatcgggcaaacagcctgccagaaaaagactaaatttcggtcagactggagactcagagtcagtcccagaccctcaacctctcggagaaccaccagcagcccccacaagtttgggatctaatacaatggcttcaggcggtggcgcaccaatggcagacaataacgagggtgccgatggagtgggtaattcctcaggaaattggcattgcgattcccaatggctgggcgacagagtcatcaccaccagcaccagaacctgggccctgcccacttacaacaaccatctctacaagcaaatctccagccaatcaggagcttcaaacgacaaccactactttggctacagcaccccttgggggtattttgactttaacagattccactgccacttctcaccacgtgactggcagcgactcattaacaacaactggggattccggcccaagaaactcagcttcaagctcttcaacatccaagttagaggggtcacgcagaacgatggcacgacgactattgccaataaccttaccagcacggttcaagtgtttacggactcggagtatcagctcccgtacgtgctcgggtcggcgcaccaaggctgtctcccgccgtttccagcggacgtcttcatggtccctcagtatggatacctcaccctgaacaacggaagtcaagcggtgggacgctcatccttttactgcctggagtacttcccttcgcagatgctaaggactggaaataacttccaattcagctataccttcgaggatgtaccttttcacagcagctacgctcacagccagagtttggatcgcttgatgaatcctcttattgatcagtatctgtactacctgaacagaacgcaaggaacaacctctggaacaaccaaccaatcacggctgctttttagccaggctgggcctcagtctatgtctttgcaggccagaaattggctacctgggccctgctaccggcaacagagactttcaaagactgctaacgacaacaacaacagtaactttccttggacagcggccagcaaatatcatctcaatggccgcgactcgctggtgaatccaggaccagctatggccagtcacaaggacgatgaagaaaaatttttccctatgcacggcaatctaatatttggcaaagaagggacaacggcaagtaacgcagaattagataatgtaatgattacggatgaagaagagattcgtaccaccaatcctgtggcaacagagcagtatggaactgtggcaaataacttgcagagctcaaatacagctcccacgactggaactgtcaatcatcagggggccttacctggcatggtgtggcaagatcgtgacgtgtaccttcaaggacctatctgggcaaagattcctcacacggatggacactttcatccttctcctctgatgggaggctttggactgaaacatccgcctcctcaaatcatgatcaaaaatactccggtaccggcaaatcctccgacgactttcagcccggccaagtttgcttcatttatcactcagtactccactggacaggtcagcgtggaaattgagtgggagctacagaaagaaaacagcaaacgttggaatccagagattcagtacacttccaactacaacaagtctgttaatgtggactttactgtagacactaatggtgtttatagtgaacctcgccctattggaacccggtatctcacacgaaacttgtaa

SEQ ID NO: 4720 - protein, 736 aa, Adeno-associated virus
MAADGYLPDWLEDNLSEGIREWWALKPGVPQPKANQQHQDNRRGLVLPGYKYLGPGNGLDKGEPVNEADAAALEHDKAYDQQLKAGDNPYLKYNHADAEFQERLQEDTSFGGNLGRAVFQAKKRILEPLGLVEEAAKTAPGKKGAVDQSPQEPDSSSGVGKSGKQPARKRLNFGQTGDSESVPDPQPLGEPPAAPTSLGSNTMASGGGAPMADNNEGADGVGNSSGNWHCDSQWLGDRVITTSTRTWALPTYNNHLYKQISSQSGASNDNHYFGYSTPWGYFDFNRFHCHFSPRDWQRLINNNWGFRPKKLSFKLFNIQVRGVTQNDGTTTIANNLTSTVQVFTDSEYQLPYVLGSAHQGCLPPFPADVFMVPQYGYLTLNNGSQAVGRSSFYCLEYFPSQMLRTGNNFQFSYTFEDVPFHSSYAHSQSLDRLMNPLIDQYLYYLNRTQGTTSGTTNQSRLLFSQAGPQSMSLQARNWLPGPCYRQQRLSKTANDNNNSNFPWTAASKYHLNGRDSLVNPGPAMASHKDDEEKFFPMHGNLIFGKEGTTASNAELDNVMITDEEEIRTTNPVATEQYGTVANNLQSSNTAPTTGTVNHQGALPGMVWQDRDVYLQGPIWAKIPHTDGHFHPSPLMGGFGLKHPPPQIMIKNTPVPANPPTTFSPAKFASFITQYSTGQVSVEIEWELQKENSKRWNPEIQYTSNYNKSVNVDFTVDTNGVYSEPRPIGTRYLTRNL

SEQ ID NO: 4721 - protein, 728 aa, Adeno-associated virus
MAADGYLPDWLEDNLSEGIREWWDLKPGAPKPKANQQKQDDGRGLVLPGYKYLGPFNGLDKGEPVNEADAAALEHDKAYDKQLEQGDNPYLKYNHADAEFQERLQEDTSFGGNLGRAVFQAKKRVLEPLGLVEEGAKTAPGKKRPIESPDSSTGIGRKGQQPAKKKLNFGQTGDSESVPDPQPIGEPPAGPSGLGSGTMAAGGGAPMADNNEGADGVGNASGNWHCDSTWLGDRVITTSTRTWALPTYNNHLYKQISSQSGATNDNHFFGYSTPWGYFDFNRFHCHFSPRDWQRLINNNWGFRPRKLRFKLFNIQVKEVTTNDGVTTIANNLTSTIQVFSDSEYQLPYVLGSAHQGCLPPFPADVFMIPQYGYLTLNNGSQSVGRSSFYCLEYFPSQMLRTGNNFEFSYTFEEVPFHSSYAHSQSLDRLMNPLIDQYLYYLARTQSTTGSTRELQFHQAGPNTMAEQSKNWLPGPCYRQQRLSKNIDSNNNSNFAWTGATKYHLNGRNSLTNPGVAMATNKDDEDQFFPINGVLVFGKTGAANKTTLENVLMTSEEEIKTTNPVATEEYGVVSSNLQSSTAGPQTQTVNSQGALPGMVWQNRDVYLQGPIWAKIPHTDGNFHPSPLMGGFGLKHPPPQILIKNTPVPANPPEVFTPAKFASFITQYSTGQVSVEIEWELQKENSKRWNPEIQYTSNYAKSNNVEFAVNNEGVYTEPRPIGTRYLTRNL

SEQ ID NO: 4722 - protein, 728 aa, Adeno-associated virus
MAADGYLPDWLEDNLSEGIREWWDLKPGAPKPKANQQKQDDGRGLVLPGYKYLGPFNGLDKGEPVNAADAAALEHDKAYDQQLKAGDNPYLRYNHADAEFQERLQEDTSFGGNLGRAVFQAKKRVLEPLGLVEEGAKTAPGKKRPIESPDSSTGIGKKGQQPAKKKLNFGQTGDSESVPDPQPIGEPPAGPSGLGSGTMAAGGGAPMADNNEGADGVGNASGNWHCDSTWLGDRVITTSTRTWALPTYNNHLYKQISSQSGATNDNHFFGYSTPWGYFDFNRFHCHFSPRDWQRLINNNWGFRPRKLRFKLFNIQVKEVTTNDGVTTIANNLTSTIQVFSDSEYQLPYVLGSAHQGCLPPFPADVFMIPQYGYLTLNNGSQSVGRSSFYCLEYFPSQMLRTGNNFEFSYTFEEVPFHSSYAHSQSLDRLMNPLIDQYLYYLARTQSTTGSTRELQFHQAGPNTMAEQSKNWLPGPCYRRQRLSKDIDSNNNSNFAWTGATKYHLNGRNSLTNPGVAMATNKDDEDQFFPINGVLVFGKTGAANKTTLENVLMTSEEEIKTTNPVATEEYGVVSSNLQSSTAGPQTQTVNSQGALPGMVWQNRDVYLQGPIWAKIPHTDGNFHPSPLMGGFGLKHPPPQILIKNTPVPANPPEVFTPAKFASFITQYSTGQVSVEIEWELQKENSKRWNPEIQYTSNYAKSNNVEFAVNNEGVYTEPRPIGTRYLTRNL

SEQ ID NO: 4723 - protein, 685 aa, Adeno-associated virus
MAADGYLPDWLEDNLSEGIREWWDLKPGAPKPKANQQKQDDGRGLVLPGYKYLGPFNGLDKGEPVNEADAAALEHDKAYDKQLEQGDNPYLKYNHADAEFQERLQEDTSFGGNLGRAVFQAKKRVLEPLGLVEEGAKTAPGKKRPVEPSPQRSPDSSTGIGKTGQQPAKKRLNFGQTGDSESVPDPQPIGEPPAGPSGLGSGTMAAGGGAPMADNNEGADGVGSSSGNWHCDSTWLGDRVITTSTRTWALPTYNNHLYKQISNGTSGGSTNDNTYFGYSTPWGYFDFNRFHCHFSPRDWQRLINNNWGFRPKRLNFKLFNIQVKEVTQNEGTKTIANNLTSTIQVFTDSEYQLPYVLGSAHQGCLPPFPADVFMIPQYGYLTLNNGSQAVGRSSFYCLEYFPSQMLRTGNNFEFSYQFEDVPFHSSYAHSQSLDRLTNPLIDQYLYYLARTQSTTGSTRGLQFHQAGPNTMAEQSKNWLPGPCYRQQRLSKNIDSNNNSNFAWTGATKYHLNGRNSLTNPGVAMATNKDDEDQFFPINGVLVFGKTGAANKTTLENVLMTSEEEIKTTNPVATEEYGVVSSNLQSSTAGPQTQTVNSQGALPGMVWQNRDVYLQGPIWAKIPHTDGNFHPSPLMGGFGLKHPPPQILIKYTSNYYKSTNVDFAVNTEGTYSEPRPIGTRYLTRNL

SEQ ID NO: 4724 - protein, 733 aa, Adeno-associated virus
MAADGYLPDWLEDNLSEGIREWWDLKPGAPKPKANQQKQDDGRGLVLPGYKYLGPFNGLDKGEPVNAADAAALEHDKAYDQQLKAGDNPYLRYNHADAEFQERLQEDTSFGGNLGRAVFQAKKRVLEPLGLVEEGAKTAPGKKRPIESPDSSTGIGKKGQQPAKKKLNFGQTGDSESVPDPQPIGEPPAGPSGLGSGTMAAGGGAPMADNNEGADGVGSSSGNWHCDSTWLGDRVITTSTRTWALPTYNNHLYKQISNGTSGGSTNDNTYFGYSTPWGYFDFNRFHCHFSPRDWQRLINNNWGFRPKRLNFKLFNIQVKEVTQNEGTKTIANNLTSTIQVFTDSEYQLPYVLGSAHQGCLPPFPADVFMIPQYGYLTLNNGSQAVGRSSFYCLEYFPSQMLRTGNNFEFSYQFEDVPFHSSYAHSQSLDRLMNPLIDQYLYYLSRTQSTGGTAGTQQLLFSQAGPNNMSAQAKNWLPGPCYRQQRVSTTVSQNNNSNFAWTGATKYHLNGRDSLVNPGVAMATHKGDEERFFPSSGVLMFGKQGAGKDNVDYSSVMLTSEEEIKTTNPVATEQYGVVADNLQQQNAAPIVGAVNSQGALPGMVWQNRDVYLQGPIWAKIPHTDGNFHPSPLMGGFGLKHPPPQILIKNTPVPADPPTTFSQAKLASFITQYSTGQVSVEIEWELQKENSKRWNPEIQYTSNYYKSTNVDFAVNTEGTYSEPRPIGTRYLTRSL

SEQ ID NO: 4725 - protein, 738 aa, Adeno-associated virus
MAADGYLPDWLEDNLSEGIREWWDLKPGAPKPKANQQKQDDGRGLVLPGYKYLGPFNGLDKGEPVNAADAAALEHDKAYDQQLKAGDNPYLRYNHADAEFQERLQEDTSFGGNLGRAVFQAKKRVLEPLGLVEEGAKTAPGKKRPVEPSPQRSPDSSTGIGKTGQQPAKKRLNFGQTGDSESVPDPQPIGEPPAGPSGLGSGTMAAGGGAPMADNNEGADGVGSSSGNWHCDSTWLGDRVITTSTRTWALPTYNNHLYKQISNGTSGGSTNDNTYFGYSTPWGYFDFNRFHCHFSPRDWQRLINNNWGFRPKRLNFKLFNIQVKEVTQNEGTKTIANNLTSTIQVFTDSEYQLPYVLGSAHQGCPPPFPADVFMIPQYGYLTLNNGSQAVGRSSFYCLEYFPSQMRRTGNNFEFSYQFEDVPFHSSYAHSQSLDRLMNPLIDQYLYYLSRTQSTGGTAGTQQLLFSQAGPNNMSAQAKNWLPGPCYRQQRVSTTLSQNNNSNFAWTGATKYHLNGRDSLVNPGVAMATHKDDEERFFPSSGVLMFGKQGAGKDNVDYSSVMLTSEEEIKTTNPVATEQYGVVADNLQQQNAAPIVGAVNSQGALPGMVWQNRDVYLQGPIWAKIPHTDGNFHPSPLMGGFGLKHPPPQILIKNTPVPADPPTTFSQAKLASFITQYSTGQVSVEIEWELQKENSKRWNPEIQYTSNYYKSTNVDFAVNTEGTYSEPRPIGTRYLTRNL

SEQ ID NO: 4726 - protein, 733 aa, Adeno-associated virus
MAADGYLPDWLEDNLSEGIREWWDLRPGAPKPKANQQKQDDGRGLVLPGYKYLGPFNGLDKGEPVNEADAAALEHDKAYDKQLEQGDNPYLKYNHADAEFQERLQEDTSFGGNLGRAVFQAKKRVLEPLGLVEEGAKTAPGKKRPIESPDSSTGIGKKGQQPAKKRLNFGQTGDSESVPDPQPIGEPPAGPSGLGSGTMAAGGGAPMADNNEGADGVGSSSGNWHCDSTWLGDRVITTSTRTWALPTYNNHLYKQISNGTSGGSTNDNTYFGYSTPWGYFDFNRFHCHFSPRDWQRLINNNWGFRPKRLNFKLFNIQVKEVTQNEGTKTIANNLTSTIQVFTDSEYQLPYVLGSAHQGCLPPFPADVFMIPQYGYLTLNNGSQAVGRSSFYCLEYFPSQMLRTGNNFEFSYQFEDVPFHSSYAHSQSLDRLMNPLIDQYLYYLSRTQSTGGTAGTQQLLFSQAGPNNMSAQAKNWLPGPCYRQQRVSTTVSQNNNSNFAWTGATKYHLNGRDSLVNPGVAMATHKGDEERFFPSSGVLMFGKQGAGKDNVDYSSVMLTSEEEIKTTNPVATEQYGVVADNLQQQNAAPIVGAVNSQGALPGMVWQNRDVYLQGPIWAKIPHTDGNFHPSPLMGGFGLKHPPPQILIKNTPVPADPPTTFSQAKLASFITQYSTGQVSVEIEWELQKENSKRWNPEIQYTSNYYKSTNVDFAVNTEGTYSEPRPIGTRYLTRNL

SEQ ID NO: 4727 - protein, 3098 aa, Adeno-associated virus
GAATTCGCCCTTTCTACGGCTGCGTCAACTGGACCAATGAGAACTTTCCCTTCAACGATTGCGTCGACAAGATGGTGATCTGGTGGGAGGAGGGCAAGATGACGGCCAAGGTCGTGGAGTCCGCCAAGGCCATTCTCGGCGGCAGCAAGGTGCGCGTGGACCAAAAGTGCAAGTCTTCCGCCCAGATCGATCCCACCCCCGTGATCGTCACTTCCAACACCAACATGTGCGCTGTGATTGACGGGAACAGCACCACCTTCGAGCACCAGCAGCCGTTACAAGACCGGATGTTCAAATTTGAACTCACCCGCCGTCTGGAGCACGACTTTGGCAAGGTGACAAAGCAGGAAGTCAAAGAGTTCTTCCGCTGGGCGCAGGATCACGTGACCGAGGTGGCGCATGAGTTCTACGTCAGAAAGGGTGGAGCCAACAAGAGACCCGCCCCCGATGACGCGGATAAAAGCGAGCCCAAGCGGGCCTGCCCCTCAGTCGCGGATCCATCGACGTCAGACGCGGAAGGAGCTCCGGTGGACTTTGCCGACAGGTACCAAAACAAATGTTCTCGTCACGCGGGCATGCTTCAGATGCTGTTTCCCTGCAAGACATGCGAGAGAATGAATCAGAATTTCAACATTTGCTTCACGCACGGGACCAGAGACTGTTCAGAATGTTTCCCCGGCGTGTCAGAATCTCAACCGGTCGTCAGAAAGAGGACGTATCGGAAACTCTGTGCCATTCATCATCTGCTGGGGCGGGCTCCCGAGATTGCTTGCTCGGCCTGCGATCTGGTCAACGTGGACCTGGATGACCGTGTTTCTGAGCAATAAATGACTTAAACCAGGTATGGCTGCCGATGGTTATCTTCCAGATTGGCTCGAGGACAACCTCTCTGAGGGCATTCGCGAGTGGTGGGACTTGAAACCTGGAGCCCCGAAACCCAAAGCCAACCAGCAAAAGCAGGACGACGGCCGGGGTCTGGTGCTTCCTGGCTACAAGTACCTCGGACCCTTCAACGGACTCGACAAGGGAGAGCCGGTCAACGAGGCAGACGCCGCGGCCCTCGAGCACGACAAGGCCTACGACAAGCAGCTCGAGCAGGGGGACAACCCGTACCTCAAGTACAACCACGCCGACGCCGAGTTTCAGGAGCGTCTTCAAGAAGATACGTCTTTTGGGGGCAACCTCGGGCGAGCAGTCTTCCAGGCCAAGAAGCGGGTTCTCGAACCTCTCGGTCTGGTTGAGGAAGGCGCTAAGACGGCTCCTGGAAAGAAGAGACCCATAGAATCCCCCGACTCCTCCACGGGCATCGGCAAGAAAGGCCAGCAGCCCGCTAAAAAGAAGCTCAACTTTGGGCAGACTGGCGACTCAGAGTCAGTGCCCGACCCCCAACCTCTCGGAGAACCTCCCGCCGCGCCCTCAGGTCTGGGATCTGGTACAATGGCTGCAGGCGGTGGCGCACCAATGGCAGACAATAACGAAGGCGCCGACGGAGTGGGTAATGCCTCCGGAAATTGGCATTGCGATTCCACATGGCTGGGCGACAGAGTCATCACCACCAGCACCCGCACCTGGGCCCTGCCCACCTACAACAACCACCTCTACAAGCAGATATCAAGTCAGAGCGGGGCTACCAACGACAACCACTTCTTCGGCTACAGCACCCCCTGGGGCTATTTTGACTTCAACAGATTCCACTGCCACTTCTCACCACGTGACTGGCAGCGACTCATCAACAACAACTGGGGATTCCGGCCCAGAAAGCTGCGGTTCAAGTTGTTCAACATCCAGGTCAAGGAGGTCACGACGAACGACGGCGTTACGACCATCGCTAATAACCTTACCAGCACGATTCAGGTCTTCTCGGACTCGGAGTACCAACTGCCGTACGTCCTCGGCTCTGCGCACCAGGGCTGCCTCCCTCCGTTCCCTGCGGACGTGTTCATGATTCCTCAGTACGGATATCTGACTCTAAACAACGGCAGTCAGTCTGTGGGACGTTCCTCCTTCTACTGCCTGGAGTACTTTCCTTCTCAGATGCTGAGAACGGGCAATAACTTTGAATTCAGCTACACCTTTGAGGAAGTGCCTTTCCACAGCAGCTATGCGCACAGCCAGAGCCTGGACCGGCTGATGAATCCCCTCATCGACCAGTACCTGTACTACCTGGCCCGGACCCAGAGCACTACGGGGTCCACAAGGGAGCTGCAGTTCCATCAGGCTGGGCCCAACACCATGGCCGAGCAATCAAAGAACTGGCTGCCCGGACCCTGTTATCGGCAGCAGAGACTGTCAAAAAACATAGACAGCAACAACAACAGTAACTTTGCCTGGACCGGGGCCACTAAATACCATCTGAATGGTAGAAATTCATTAACCAACCCGGGCGTAGCCATGGCCACCAACAAGGACGACGAGGACCAGTTCTTTCCCATCAACGGAGTGCTGGTTTTTGGCGAAACGGGGGCTGCCAACAAGACAACGCTGGAAAACGTGCTAATGACCAGCGAGGAGGAGATCAAAACCACCAATCCCGTGGCTACAGAAGAATACGGTGTGGTCTCCAGCAACCTGCAATCGTCTACGGCCGGACCCCAGACACAGACTGTCAACAGCCAGGGGGCTCTGCCCGGCATGGTCTGGCAGAACCGGGACGTGTACCTGCAGGGTCCCATCTGGGCCAAAATTCCTCACACGGACGGCAACTTTCACCCGTCTCCCCTGATGGGCGGATTTGGACTCAAACACCCGCCTCCTCAAATTCTCATCAAAAACACCCCGGTACCTGCTAATCCTCCAGAGGTGTTTACTCCTGCCAAGTTTGCCTCATTTATCACGCAGTACAGCACCGGCCAGGTCAGCGTGGAGATCGAGTGGGAACTGCAGAAAGAAAACAGCAAACGCTGGAATCCAGAGATTCAGTACACCTCAAATTATGCCAAGTCTAATAATGTGGAATTTGCTGTCAACAACGAAGGGGTTTATACTGAGCCTCGCCCCATTGGCACCCGTTACCTCACCCGTAACCTGTAATTGCCTGTTAATCAATAAACCGGTTAATTCGTTTCAGTTGAACTTTGGTCTCTGCGAAGGGCGAATTC

SEQ ID NO: 4728 - protein, 728 aa, Adeno-associated virus
MAADGYLPDWLEDNLSEGIREWWDLKPGAPKPKANQQKQDDGRGLVLPGYKYLGPFNGLDKGEPVNEADAAALEHDKAYDKQLEQGDNPYLKYNHADAEFQERLQEDTSFGGNLGRAVFQAKKRVLEPLGLVEEGAKTAPGKKRPIESPDSSTGIGKKGQQPAKKKLNFGQTGDSESVPDPQPLGEPPAAPSGLGSGTMAAGGGAPMADNNEGADGVGNASGNWHCDSTWLGDRVITTSTRTWALPTYNNHLYKQISSQSGATNDNHFFGYSTPWGYFDFNRFHCHFSPRDWQRLINNNWGFRPRKLRFKLFNIQVKEVTTNDGVTTIANNLTSTIQVFSDSEYQLPYVLGSAHQGCLPPFPADVFMIPQYGYLTLNNGSQSVGRSSFYCLEYFPSQMLRTGNNFEFSYTFEEVPFHSSYAHSQSLDRLMNPLIDQYLYYLARTQSTTGSTRELQFHQAGPNTMAEQSKNWLPGPCYRQQRLSKNIDSNNNSNFAWTGATKYHLNGRNSLTNPGVAMATNKDDEDQFFPINGVLVFGETGAANKTTLENVLMTSEEEIKTTNPVATEEYGVVSSNLQSSTAGPQTQTVNSQGALPGMVWQNRDVYLQGPIWAKIPHTDGNFHPSPLMGGFGLKHPPPQILIKNTPVPANPPEVFTPAKFASFITQYSTGQVSVEIEWELQKENSKRWNPEIQYTSNYAKSNNVEFAVNNEGVYTEPRPIGTRYLTRNL

SEQ ID NO: 4729 - protein, 733 aa, Adeno-associated virus
MAADGHLPDWLEDNLSEGIREWWDLKPGAPKPKANQQKQDDGRGLVLPGYKYLGPFNGLDKGEPVNAADAAALEHDKAYDQQLKAGDNPYLRYNHADAEFQERLQEDTSFGGNLGRAVFQAKKRVLEPLGLVEEGAKTAPGKKRPIESPDSSTGIGKKGQQPAKKKLNFGQTGDSESVPDPQPIGEPPAGPSGLGSGTMAAGGGAPMADNNEGADGVGSSSGNWHCDSTWLGDRVITTSTRTWALPTYNNHLYKQISNGTSGGSTNDNTYFGYSTPWGYFDFNRFHCHFSPRDWQRLINNSWGFRPKRLNFKLFNIQVKEVTQNEGTKTIANNLTSTIQVFTDSEYQLPYVLGSAHQGCLPPFPADVFMIPQYGYLTLNNGSQAVGRSSFYCLEYFPSQMLRTGNNFEFSYQFEDVPFHSSYAHSQSLDRLMNPLIDQYLYYLSRTQSTGGTAGTQQLLFSQAGPNNMSAQAKNWLPGPCYRQQRVSTTLSQNNNSNFAWTGATKYHLNGRDSLVNPGVAMATHKDDEERFFPSSGVLMFGKQGAGKDNVDYSSVMLTSEEEIKTTNPVATEQYGVVADNLQQQNAAPIVGAVNSQGALPGMVWQNRDVYLQGPIWAKIPHTDGNFHPSPLMGGFGLKHPPPQILIKNTPVPADPPTTFSQAKLASFITQYSTGQVSVEIEWELQKENSKRWNPEIQYTSNYYKSTNVDFAVNTEGTYSEPRPIGTRYLTRNL

SEQ ID NO: 4730 - DNA, 2495 bp, Adeno-associated virus
  source 1..2495: mol_type = genomic DNA
gaattcgccctttctacggctgcgtcaactagaccaatgagaactttcccttcaacgattgcgtcgacaagatggtgatctggtgggaggagggcaagatgacggccaaggtcgtggagtccgccaaggccattcatcatctgctggggcgggctcccgagattgcttgctcggcctgcgatctggtcaacgtggacctggatgactgtgtttctgagcaataaatgacttaaaccaggtatggctgccgatggttatcttccagattggctcgaggacaacctctctgagggcattcgcgagtggtgggacttgaaacctggagccccgaaacccaaagccaaccagcaaaagcaggacgacggccggggtctggtgcttcctggctacaagtacctcggacccttcaacggactcgacaagggagagccggtcaacgaggcagacgccgcggccctcgagcacgacaaggcctacgacaagcagctcgagcagggggacaacccgtacctcaagtacaaccacgccgacgccgagtttcaggagcgtcttcaagaagatacgtcttttgggggcaacctcgggcgagcagtcttccaggccaagaagcgggttctcgaacctctcggtctggttgaggaaggcgctaagacggctcctggaaagaagagacccatagaatcccccgactcctccacgggcatcggcaagaaaggccagcagcccgctaaaaagaagctcaactttgggcagactggcgactcagagtcagtgcccgaccctcaaccaatcggagaaccccccgcaggcccctctggtctgggatctggtacaatggctgcaggcggtggcgctccaatggcagacaataacgaaggcgccgacggagtgggtaatgcctccggaaattggcattgcgattccacatggctgggcgacagagtcatcaccaccagcacccgcacctgggccctgcccacctacaacaaccacctctacaagcagatatcaagtcagagcggggctaccaacgacaaccacttcttcggctacagcaccccctggggctattttgacttcaacagattccactgccacttctcaccacgtgactggcagcgactcatcaacaacaactggggattccggcccagaaagctgcggttcaagttgttcaacatccaggtcaaggaggtcacgacgaacgacggcgttacgaccatcgctaataaccttaccagcacgattcaggtcttctcggactcggagtaccaactgccgtacgtcctcggctctgcgcaccagggctgcctccctccgttccctgcggacgtgttcatgattcctcagtacggatatctgactctaaacaacggcagtcagtctgtgggacgttcctccttctactgcctggagtactttccttctcagatgctgagaacgggcaataactttgaattcagctacacctttgaggaagtgcctttccacagcagctatgcgcacagccagagcctggaccggctgatgaatcccctcatcgaccagtacctgtactacctggcccggacccagagcactacggggtccacaagggagctgcagttccatcaggctgggcccaacaccatggccgagcaatcaaagaactggctgcccggaccctgttatcggcagcagagactgtcaaaaaacatagacagcaacaacaccagtaactttgcctggaccggggccactaaataccatctgaatggtagaaattcattaaccaacccgggcgtagccatggccaccaacaaggacgacgaggaccagttctttcccatcaacggagtgctggtttttggcaaaacgggggctgccaacaagacaacgctggaaaacgtgctaatgaccagcgaggaggagatcaaaaccaccaatcccgtggctacagaacagtacggtgtggtctccagcaacctgcaatcgtctacggccggaccccagacacagactgtcaacagccagggggctctgcccggcatggtctggcagaaccgggacgtgtacctgcagggtcccatctgggccaaaattcctcacacggacggcaactttcacccgtctcccctgatgggcggatttggactcaaacacccgcctcctcaaattctcatcaaaaacaccccggtacctgctaatcctccagaggtgtttactcctgccaagtttgcctcatttatcacgcagtacagcaccggccaggtcagcgtggagatcgagtgggaactgcagaaagaaaacagcaaacgctggaatccagagattcagtacacctcaaattatgccaagtctaataatgtggaatttgctgtcaacaacgaaggggtttatactgagcctcgccccattggcacccgttacctcacccgtaacctgtaattgcctgttaatcaataaaccggttaattcgtttcagttgaactttggtctctgcgaagggcgaattc

SEQ ID NO: 4731 - protein, 728 aa, Adeno-associated virus
MAADGYLPDWLEDNLSEGIREWWDLKPGAPKPKANQQKQDDGRGLVLPGYKYLGPFNGLDKGEPVNEADAAALEHDKAYDKQLEQGDNPYLKYNHADAEFQERLQEDTSFGGNLGRAVFQAKKRVLEPLGLVEEGAKTAPGKKRPIESPDSSTGIGKKGQQPAKKKLNFGQTGDSESVPDPQPIGEPPAGPSGLGSGTMAAGGGAPMADNNEGADGVGNASGNWHCDSTWLGDRVITTSTRTWALPTYNNHLYKQISSQSGATNDNHFFGYSTPWGYFDFNRFHCHFSPRDWQRLINNNWGFRPRKLRFKLFNIQVKEVTTNDGVTTIANNLTSTIQVFSDSEYQLPYVLGSAHQGCLPPFPADVFMIPQYGYLTLNNGSQSVGRSSFYCLEYFPSQMLRTGNNFEFSYTFEEVPFHSSYAHSQSLDRLMNPLIDQYLYYLARTQSTTGSTRELQFHQAGPNTMAEQSKNWLPGPCYRQQRLSKNIDSNNTSNFAWTGATKYHLNGRNSLTNPGVAMATNKDDEDQFFPINGVLVFGKTGAANKTTLENVLMTSEEEIKTTNPVATEQYGVVSSNLQSSTAGPQTQTVNSQGALPGMVWQNRDVYLQGPIWAKIPHTDGNFHPSPLMGGFGLKHPPPQILIKNTPVPANPPEVFTPAKFASFITQYSTGQVSVEIEWELQKENSKRWNPEIQYTSNYAKSNNVEFAVNNEGVYTEPRPIGTRYLTRNL

SEQ ID NO: 4732 - DNA, 2504 bp, Adeno-associated virus
  source 1..2504: mol_type = genomic DNA
gaattcgccctttctacggctgcgtcaactggaccaatgagaactttcccttcaacgattgcgtcgacaagatggtgatctggtgggaggagggcaagatgacggccaaggtcgtggagtccgccaaggccattcatcatctgctggggcgggctcccgagattgcttgctcggcctgcgatctggtcaacgtggacctggatgactgtgtttctgagcaataaatgacttaaaccaggtatggctgccgatggttatcttccagattggctcgaggacaacctctctgagggcattcgcgagtggtgggacttgaaacctggagccccgaaacccaaagccaaccagcaaaagcaggacgacggccggggtctggtgcttcctggctacaagtacctcggacccttcaacggactcgacaagggagagccggtcaacgaggcagacgccgcggccctcgagcacgacaaggcctacgacaagcagctcgagcagggggacaacccgtacctcaagtacaaccacgccgacgccgagtttcaggagcgtcttcaagaagatacgtcttttgggggcaacctcgggcgagcagtcttccaggccaagaagcgggttctcgaacctctcggtctggttgaggaaggcgctaagacggctcctggaaagaagagacccatagaatcccccgactcctccacgggcatcggcaagaaaggccagcagcccgctaaaaagaagctcaactttgggcagactggcgactcagagtcagtgcccgaccctcaaccaatcggagaaccccccgcaggcccctctggtctgggatctggtacaatggctgcaggcggtggcgctccaatggcagacaataacgaaggcgccgacggagtgggtaatgcctccggaaattggcattgcgattccacatggctgggcgacagagtcatcaccaccagcacccgcacctgggccctgcccacctacaacaaccacctctacaagcagatatcaagtcagagcggggctaccaacgacaaccacttcttcggctacagcaccccctggggctattttgacttcaacagattccactgccacttctcatcacgtgactggcagcgactcatcaacaacaactggggattccggcccaagagactcaacttcaagctcttcaacatccaggtcaaggaggtcacgcagaatgaaggcaccaagaccatcgccaataaccttaccagcacgattcaggtctttacggactcggaataccggctcccgtacgtcctcggctctgcgcaccagggctgcctgcctccgttcccggcggacgtcttcatgattcctcagtacgggtacctgactctgaacaacggcagtcaggccgtgggccgttcctccttctactgcctggagtactttccttctcaaatgctgagaacgggcaacaactttgagttcagctaccagtttgaggacgtgccttttcacagcagctacgcgcacagccaaagcctggaccggctgatgaaccccctcatcgaccagtacctgtactacctgtctcggactcagtccacgggaggtaccgcaggaactcagcagttgctattttctcaggccgggcctaataacatgtcggctcaggccaaaaactggctacccgggccctgctaccggcagcaacgcgtctccacgacactgtcgcaaaataacaacagcaactttgcttggaccggtgccaccaagtatcatctgaatggcagagactctctggtaaatcccggtgtcgctatggcaacgcacaaggacgacgaagagcgattttttccatccagcggagtcttgatgtttgggaaacagggagctggaaaagacaacgtggactatagcagcgttatgctaaccagtgaggaagaaatcaaaaccaccaacccagtggccacagaacagtacggcgtggtggccgataacctgcaacagcaaaacgccgctcctattgtaggggccgtcaacagtcaaggagccttacctggcatggtctggcagaaccgggacgtgtacctgcagggtcctatctgggccaagattcctcacacggacggcaactttcatccttcgccgctgatgggaggctttggactgaaacacccgcctcctcagatcctgattaagaatacacctgttcccgcggatcctccaactaccttcagtcaagccaagccggcgtcgttcatcacgcagtacagcaccggacaggtcagcgtggaaattgaatgggagctgcagaaagagaacagcaagcgctggaacccagagattcagtatacttccaactactacaaatctacaaatgtggactttgctgtcaatactgagggtacttattcagagcctcgccccattggcacccgttacctcacccgtaacctgtaattgcctgttaatcaataaaccggttaattcgtttcagttgaactttggtctctgcgaagggcgaattc

SEQ ID NO: 4733 - protein, 731 aa, Adeno-associated virus
MAADGYLPDWLEDNLSEGIREWWDLKPGAPKPKANQQKQDDGRGLVLPGYKYLGPFNGLDKGEPVNEADAAALEHDKAYDKQLEQGDNPYLKYNHADAEFQERLQEDTSFGGNLGRAVFQAKKRVLEPLGLVEEGAKTAPGKKRPIESPDSSTGIGKKGQQPAKKKLNFGQTGDSESVPDPQPIGEPPAGPSGLGSGTMAAGGGAPMADNNEGADGVGNASGNWHCDSTWLGDRVITTSTRTWALPTYNNHLYKQISSQSGATNDNHFFGYSTPWGYFDFNRFHCHFSSRDWQRLINNNWGFRPKRLNFKLFNIQVKEVTQNEGTKTIANNLTSTIQVFTDSEYRLPYVLGSAHQGCLPPFPADVFMIPQYGYLTLNNGSQAVGRSSFYCLEYFPSQMLRTGNNFEFSYQFEDVPFHSSYAHSQSLDRLMNPLIDQYLYYLSRTQSTGGTAGTQQLLFSQAGPNNMSAQAKNWLPGPCYRQQRVSTTLSQNNNSNFAWTGATKYHLNGRDSLVNPGVAMATHKDDEERFFPSSGVLMFGKQGAGKDNVDYSSVMLTSEEEIKTTNPVATEQYGVVADNLQQQNAAPIVGAVNSQGALPGMVWQNRDVYLQGPIWAKIPHTDGNFHPSPLMGGFGLKHPPPQILIKNTPVPADPPTTFSQAKPASFITQYSTGQVSVEIEWELQKENSKRWNPEIQYTSNYYKSTNVDFAVNTEGTYSEPRPIGTRYLTRNL

SEQ ID NO: 4734 - protein, 731 aa, Adeno-associated virus
MAADGYLPDWLEDNLSEGIREWWDLKPGAPKPKANQQKQDDGRGLVLPGYKYLGPFNGLDKGEPVNEADAAALEHDKAYDKQLEQGDNPYLKYNHADAEFQERLQEDTSFGGNLGRAVFRAKKRVLEPLGLVEEGAKTAPGKKRPIESPDSSTGIGKKGQQPAKKKLNFGQTGDSESVPDPQPLGEPPAAPSGLGSGTMAAGGGAPMADNNEGADGVGNASGNWHCDSTWLGDRVITTSTRTWALPTYNNHLYKQISSQSGATNDNHFFGYSTPWGYFDFNRFHCHFSPRDWQRLINNNRGFRPRKLRFKLFNIQVKEVTTNDGVTTIANNLTSTIQVFSDSEYQLPYVLGSAHQGCLPPFPADVFMIPQYGYLTLNNGSQSVGRSSFYCLEYFPSQMLRTGNNFEFSYQFEDVPFHSSYAHSQSLDRLMNPLIDQYLYYLSRTQSTGGTAGTQQLLFSQAGPNNMSAQAKNWLPGPCYRQQRVSTTLSQNNNSNFAWTGATKYHLNGRDSLVNPGVAMATHKDDEERFFPSSGVLMFGKQGAGKDNVDYSSVMLTSEEEIKTTNPVATEQYGVVADNLQQQNAAPIVGAVNSQGALPGMAWQNRDVYLQGPIWAKIPHTDGNFHPSPLMGGFGLKHPPPQILIKNTPVPADPPTTFSQAKLASFITQYSTGQVSVEIEWELQKENSKRWNPEIQYTSNYYKSTNVDFAVNTEGTYSEPRPIGTRYLTRNL

SEQ ID NO: 4735 - protein, 738 aa, Adeno-associated virus
MAADGYLPDWLEDNLSEGIREWWDLKPGAPKPKANQQKQDDGRGLVLPGYKYLGPFNGLDKGEPVNEADAAALEHDKAYDKQLEQGDNPYLKYNHADAEFQERLQEDTSFGGNLGRAVFQAKKRVLEPLGLVEEGAKTAPGKKRPVEPSPQRSPDSSTGIGKTGQQPAKKRLNFGQTGDSESVPDPQPIGEPPAGPSGLGSGTMAAGGGAPMADNNEGADGVGSSSGNWHCDSTWLGDRVITTSTRTWALPTYNNHLYKQISNGTSGGSTNDNTYFGYSTPWGYFDFNRFHCHFSPRDWQRLINNNWGFRPKRLNFKLFNIQVKEVTQNEGTKTIANNLTSTIQVFTDSEYQLPYVLGSAHQGCLPPFPADVFMIPQYGYLTLNNGSQAVGRSSFYCLEYFPSQMLRTGNNFEFSYQFEDVPFHSSYAHSQSLDRLMNPLIDQYLYYLSRTQSTGGTAGTQQLLFSQAGPNNMSAQAKNWLPGPCYRQQRVSTTLSQNNNSNFAWTGATKYHLNGRDSLVNPGVAMATHKDDEERFFPSSGVLMFGKQGAGKDNVDYSSVMLTSEEEIKTTNPVATEQYGVVADNLQQQNAAPIVGAVNSQGALPGMVWQNRDVYLQGPIWAKIPHTDGNFHPSPLMGGFGLKHPPPQILIKNTPVPADPPTTFSQAKLASFITQYSTGQVSVEIEWELQKENSKRWNPEIQYTSNYYKSTNVDFAVNTEGTYSEPRPIGTRYLTRNL

SEQ ID NO: 4736 - protein, 735 aa, Adeno-associated virus
MAADGYLPDWLEDNLSEGIREWWDLKPGAPKPKANQQKQDDGRGLVLPGYKYLGPFNGLDKGEPVNEADAAALEHDKAYDKQLEQGDNPYLKYNHADAEFQERLQEDTSFGGNLGRAVFQAKKRVLEPLGLVEEGAKTAPGKKRPVEPSPQRSPDSSTGIGKTGQQPAKKRLNFGQTGDSESVPDPQPIGEPPAGPSGLGSGTMAAGGGAPMADNNEGADGVGSSSGNWHCDSTWLGDRVITTSTRTWALPTYNNHLYKQISNGTSGGSTNDNTYFGYSTPWGYFDFNRFHCHFSPRDWQRLINNNWGFRPRKLRFKLFNIQVKEVTTDDGVTTIANNLTSTIQVFSDSEYQLPYVLGSAHQGCLPPFPADVFMIPQYGYLTLNNGSQSVGRSSFYCLEYFPSQMLRTGNNFEFSYTFEEVPFHSSYAHSQSLDRLMNPLIDQYLYYLARTQSTTGSTRELQFHQAGPNTMAEQSKNWLPGPCYRQQRLSKNIDSNNNSNFAWTGATKYHLNGRNSLTNPGVAMATNKDDEDQFFPINGVLVFGKTGAANKTTLENVLMTSEEEIKTTNPVATEEYGVVSSNLQSSTAGPQTQTVNSQGALPGMVWQNRDVYLQGPIWAKIPHTDGNFHPSPLMDGFGLKHPPPQILIKNTPVPANPPEVFTPAKFASFITQYSTGQVSVEIEWELQKENSKRWNPEIQYTSNYAKSNNVEFAVNNEGVYTEPRPIGTRYLTRNL

SEQ ID NO: 4737 - DNA, 3128 bp, Adeno-associated virus
  source 1..3128: mol_type = genomic DNA
gaattcgccctttctacggctgcgtcaactggaccaatgagaactttcccttcaacgattgcgtcgacaagatggtgatctggtgggaggagggcaagatgacggccaaggtcgtggagtccgccaaggccattctcggcggcagcaaggtgcgcgtggaccaaaagtgcaagtcttccgcccagatcgatcccacccccgtgatcgtcacttccaacaccaacatgtgcgccgtgattgacgggaacagcaccaccttcgagcaccagcagccgttacaagaccggatgttcaaatttgaactcacccgccgtctggagcacgactttggcaaggtgacaaagcaggaagtcaaagagttcttccgctgggcgcaggatcacgtgaccgaggtggcgcatgagttctacgtcagaaagggtggagccaacaagagacccgcccccgatgacgcggataaaagcgagcccaagcgggcctgcccctcagtcgcggatccatcgacgtcagacgcggaaggagctccggtggactttgccgacaggtaccaaaacaaatgttctcgtcacgcgggcatgcttcagatgctgtttccctgcaagacatgcgagagaatgaatcagaatttcaacatttgcttcacgcacgggaccagagactgttcagaatgtttccccggcgtgtcagaatctcaaccggtcgtcagaaagaggacgtatcggaaactctgtgccattcatcatctgctagggcgggctcccgagattgcttgctcggcctgcgatctggtcaacgtggacctggatgactgtgtttctgagcaataaatgacttaaaccaggtatggctgccgatggttatcttccagattggctcgaggacaacctctctgagggcattcgcgagtggtgggacttgaaacctggagccccgaaacccaaagccaaccagcaaaagcaggacgacggccggggtctggtgcttcctggctacaagtacctcggacccttcaacggactcgacaagggggagcccgtcaacgcggcggacgcagcggccctcgagcacgacaaggcctacgaccagcagctcaaagcgggtgacaatccgtacctgcggtataaccacgccgacgccgagtttcaggagcgtctgcaagaagatacgtcttttgggggcaacctcgggcgagcagtcttccaggccaagaagcgggttctcgaacctctcggtctggttgaggaaggcgctaagacggctcctggaaagaagagaccggtagagccatcaccccagcgttctccagactcctctacgggcatcggcaagacaggccagcagcccgcgaaaaagagactcaactttgggcagactggcgactcagagtcagtgcccgaccctcaaccaatcggagaaccccccgcaggcccctctggtctgggatctggtacaatggctgcaggcggtggcgctccaatggcagacaataacgaaggcgccgacggagtgggtagttcctcaggaaattggcattgcgattccacatggctgggcgacagagtcatcaccaccagcacccgaacctgggccctccccacctacaacaaccacctctacaagcaaatctccaacgggacatcgggaggaagcaccaacgacaacacctacttcggctacagcaccccctgggggtattttgactttaacagattccactgccacttctcaccacgtgactggcagcgactcatcaacaacaactggggattccggcccaagagactcaacttcaagctcttcaacatccaggtcaaggaggtcacgcagaatgaaggcaccaagaccatcgccaataaccttaccagcacgattcaggtctttacggactcggaataccagctcccgtacgtcctcggctctgcgcaccagggctgcctgcctccgttcccggcggacgtcttcatgattcctcagtacgggtacctgactctgaacaacggcagtcaggccgtgggccgttcctccttctactgcctggagtactttccttctcaaatgctgagaacgggcaacaactttgagttcagctaccagtttgaggacgtgccttttcacagcagctacgcgcacagccaaagcctggaccggctgatgaaccccctcatcgaccagtacctgtactacctgtctcggactcagtccacgggaggtaccgcaggaactcagcagttgctattttctcaggccgggcctaataacatgtcggctcaggccaaaaactggctacccgggccctgctaccggcagcaacgcgtctccacgacactgtcgcaaaataacaacagcaactttgcttggaccggtgccaccaagtatcatctgaatggcagagactctctggtaaatcccggtgtcgctatggcaacgcacaaggacgacgaagagcgattttttccatccagcggagtcttgatgtttgggaaacagggagctggaaaagacaacgtggactatagcagcgttatgctaaccagtgaggaagaaatcaaaaccaccaacccagtggccacagaacagtacggcgtggtggccgataacctgcaacagcaaaacgccgctcctattgtaggggccgtcaacagtcaaggagccttacctggcatggtctggcagaaccgggacgtgtacctgcagggtcctatctgggccaagattcctcacacggacggcaactttcatccttcgccgctgatgggaggctttggactgaaacacccgcctcctcagatcctgattaagaatacacctgttcccgcggatcctccaactaccttcagtcaagccaagctggcgtcgttcatcacgcagtacagcaccggacaggtcagcgtggaaattgaatgggagctgcagaaagagaacagcaagcgctggaacccagagattcagtatacttccaactactacaaatctacaaatgtggactttgctgtcaatactgagggtacttattcagagcctcgccccattggcacccgttacctcacccgtaacctgtaattgcctgttaatcaataaaccggctaattcgtttcagttgaactttggtctctgcgaagggcgaattc

SEQ ID NO: 4738 - protein, 738 aa, Adeno-associated virus
MAADGYLPDWLEDNLSEGIREWWDLKPGAPKPKANQQKQDDGRGLVLPGYKYLGPFNGLDKGEPVNAADAAALEHDKAYDQQLKAGDNPYLRYNHADAEFQERLQEDTSFGGNLGRAVFQAKKRVLEPLGLVEEGAKTAPGKKRPVEPSPQRSPDSSTGIGKTGQQPAKKRLNFGQTGDSESVPDPQPIGEPPAGPSGLGSGTMAAGGGAPMADNNEGADGVGSSSGNWHCDSTWLGDRVITTSTRTWALPTYNNHLYKQISNGTSGGSTNDNTYFGYSTPWGYFDFNRFHCHFSPRDWQRLINNNWGFRPKRLNFKLFNIQVKEVTQNEGTKTIANNLTSTIQVFTDSEYQLPYVLGSAHQGCLPPFPADVFMIPQYGYLTLNNGSQAVGRSSFYCLEYFPSQMLRTGNNFEFSYQFEDVPFHSSYAHSQSLDRLMNPLIDQYLYYLSRTQSTGGTAGTQQLLFSQAGPNNMSAQAKNWLPGPCYRQQRVSTTLSQNNNSNFAWTGATKYHLNGRDSLVNPGVAMATHKDDEERFFPSSGVLMFGKQGAGKDNVDYSSVMLTSEEEIKTTNPVATEQYGVVADNLQQQNAAPIVGAVNSQGALPGMVWQNRDVYLQGPIWAKIPHTDGNFHPSPLMGGFGLKHPPPQILIKNTPVPADPPTTFSQAKLASFITQYSTGQVSVEIEWELQKENSKRWNPEIQYTSNYYKSTNVDFAVNTEGTYSEPRPIGTRYLTRNL

SEQ ID NO: 4739 - DNA, 3084 bp, Adeno-associated virus
  source 1..3084: mol_type = genomic DNA
gaattcgccctttctacggctgcatcaactggaccaatgagaactttcccttcaacgattgcgtcgacaagatggtgatctggtgggaggagggcaagatgacggccaaggtcgtggagtccgccaaggccattctcggcggcagcaaggtgcgcgtggaccaaaagtgcaagtcgtccgcccagatcgaccccacccccgtgatcgtcacctccaacaccaacatgtgcgccgtgattgacgggaacagcaccaccttcgagcaccagcagccgttgcaggaccggatgttcaagttcgaactcacccgccgtctggagcacgactttggcaaggtgaccaagcaggaagtcaaagagttcttccgctgggcgcaggatcacgtgaccgaggtggcgcatgagttctacgtcagaaagggcggagccagcaaaagacccgcccccgatgacgcggatataagcgagcccaagcgggcctgcccctcagtcgcggatccatcgacgtcagacgcggaaggagctccggtggactttgccgacaggtaccaaaacaaatgttctcgtcacgcgggcatgcttcagatgctgtttccctgcaaaacgtgcgagaaaatgaatcagaatttcaacatttgcttcacgcacggggtcagagactgctcagaatgtttccccggtgcatcagaatctcaaccggtcgtcagaaaaaaaacgtatcagaaactgtgtgccattcatcatctgctggggcgggcacccgagattgcttgctcggcctgcgatctggtcaacgtggacctggacgactgtgtttctgagcaataaatgacttaaaccaggtatggctgccgatggttatcttccagattggcttgaggacaacctctctgagggcattcgcgagtggtgggacctgaaacctggagccccgaaacccaaagccaaccagcaaaagcaggacgacggccggggtctggtgcttcctggctacaagtacctcggacccttcaacggactcgacaagggggagcccgtcaacgcggcggacgcagcggccctcgagcacgacaaggcctacgaccagcagctcaaagcgggtgacaatccgtacctgcggtataaccacgccgacgccgagtttcaggagcgtctgcaagaagatacgtcttttgggggcaacctcgggcgagcagtcttccaggccaagaagcgggttctcgaacctctcggtctggttgaggaaggcgctaagacggctcctggaaagaagagaccggtagagccatcacctcagcgttcccccgactcctccacgggcatcggcaagaaaggccaccagcccgcgagaaagagactgaactttgggcagactggcgactcggagtcagtccccgaccctcaaccaatcggagaaccaccagcaggcccctctggtctgggatctggtacaatggctgcaggcggtggcgctccaatggcagacaataacgaaggcgccgacggagtgggtagttcctcaggaaattggcattgcgattccacatggctgggcgacagagtcatcaccaccagcacccgaacctgggccctgcccacctacaacaaccatctctacaagcaaatctccaacgggacatcgggaggaagcactaacgacaacacctactttggctacagcaccccctgggggtattttgacttcaacagattccactgccacttctcaccacgtgactggcagcgactcatcaacaataactggggattccggcccaagagactcaacttcaagctcttcaacatccaggtcaaggaggtcacgcagaatgaaggcaccaagaccatcgccaataaccttaccagcacgattcaggtgtttacggactcggaataccagctcccgtacgtccccggctctgcgcaccagggctgcctccctccgttcccggcggacgtcttcatgattcctcagtacgggtatctgaccctaaacaatggcagtcaggctgtgggccgttcctccttctactgcctggaatacttcccttctcaaatgctgaggacgggcaacaactttgaattcagctacaccttcgaggacgtgcctttccacagcagctacgcgcacagccagagcctggaccggctgatgaaccctctcatcgaccagtacctgtattacttatccagaactcagtccacaggaggaactcaaggtactcagcaattgttattttctcaagccgggcccgcaaacatgtcggctcaggccaagaactggctacctggaccgtgttaccgtcagcaacgagtttccacgacactgtcgcaaaacaacaacagcaattttgcttggaccggtgccaccaagtatcacctgaatggcagagactccctggttaatcccggcgttgccatggctacccacaaggacgacgaggagcgcttcttcccgtcaagcggagttctaatgtttggcaagcagggggctggaaaagacaatgtggactacagcagcgtgatgctcaccagcgaagaagaaattaaaactactaacccagtggctacagagcagtatggtgtggtggcagacaacctgcagcagaccaacggagctcccattgtgggaactgtcaacagccagggggccttacctggtatggtctggcaaaaccgggacgtgtacctgcagggccccatctgggccaaaattcctcacacggacggcaactttcatccttcgccgctgatgggaggctttggactgaaacacccgcctcctcagatcctggtgaaaaacactcctgttcctgcggatcctccgaccaccttcagccaggccaagctggcttcttttatcacgcagtacagcaccggacaggtcagcgtggaaatcgaatgggagctgcagaaagaaaacagcaagcgctggaacccagagattcagtatacttccaactactacaaatctacaaatgtggactttgctgtcaatactgagggtacttattcagagcctcgccccattggcactcgttatctcacccgtaatctgtaattgcttgttaatcaataaaccggt

SEQ ID NO: 4740 - protein, 738 aa, Adeno-associated virus
MAADGYLPDWLEDNLSEGIREWWDLKPGAPKPKANQQKQDDGRGLVLPGYKYLGPFNGLDKGEPVNAADAAALEHDKAYDQQLKAGDNPYLRYNHADAEFQERLQEDTSFGGNLGRAVFQAKKRVLEPLGLVEEGAKTAPGKKRPVEPSPQRSPDSSTGIGKKGHQPARKRLNFGQTGDSESVPDPQPIGEPPAGPSGLGSGTMAAGGGAPMADNNEGADGVGSSSGNWHCDSTWLGDRVITTSTRTWALPTYNNHLYKQISNGTSGGSTNDNTYFGYSTPWGYFDFNRFHCHFSPRDWQRLINNNWGFRPKRLNFKLFNIQVKEVTQNEGTKTIANNLTSTIQVFTDSEYQLPYVPGSAHQGCLPPFPADVFMIPQYGYLTLNNGSQAVGRSSFYCLEYFPSQMLRTGNNFEFSYTFEDVPFHSSYAHSQSLDRLMNPLIDQYLYYLSRTQSTGGTQGTQQLLFSQAGPANMSAQAKNWLPGPCYRQQRVSTTLSQNNNSNFAWTGATKYHLNGRDSLVNPGVAMATHKDDEERFFPSSGVLMFGKQGAGKDNVDYSSVMLTSEEEIKTTNPVATEQYGVVADNLQQTNGAPIVGTVNSQGALPGMVWQNRDVYLQGPIWAKIPHTDGNFHPSPLMGGFGLKHPPPQILVKNTPVPADPPTTFSQAKLASFITQYSTGQVSVEIEWELQKENSKRWNPEIQYTSNYYKSTNVDFAVNTEGTYSEPRPIGTRYLTRNL

SEQ ID NO: 4741 - DNA, 3123 bp, Adeno-associated virus
  source 1..3123: mol_type = genomic DNA
gaattcgcccttggctgcgtcaactggaccaatgagaactttcccttcaacgattgcgtcgacaagatggtgatctggtgggaggagggcaagatgacggccaaggtcgtggagtccgccaaggccattctcggcggcagcaaggtgcgcgtggaccaaaagtgcaagtcgtccgcccagatcgaccccacccccgtgatcgtcacctccaacaccaacatgtgcgccgtgattgacgggaacagcaccaccttcgagcaccagcagccgttgcaggaccggatgttcaagttcgaactcacccgccgtctggagcacgactttggcaaggtgaccaagcaggaagtcaaagagttcttccgctgggcgcaggatcacgtgaccgaggtggcgcatgagttctacgtcagaaagggcggagccagcaaaagacccgcccccgatgacgcggatataagcgagcccaagcgggcctgcccctcagtcgcggatccatcgacgtcagacgcggaaggagctccggtggactttgccgacaggtaccaaaacaaatgttctcgtcacgcgggcatgctccagatgctgtttccctgcaaaacgtgcgagagaatgaatcagaatttcaacatttgcttcacgcacggggtcagagactgctcagaatgtttccccggtgcatcagaatctcaaccggtcgtcagaaaaaaaacgtatcagaaactgtgtgccattcatcatctgctggggcgggcacccgagattgcttgctcggcctgcgatctggtcaacgtggacctggacgactgtgtttctgagcaataaatgacttaaaccaggtatggctgccgatggttatcttccagattggcttgaggacaacctctctgagggcattcgcgagtggtgggacctgaaacctggagccccgaaacccaaagccaaccagcaaaagcaggacgacggccggggtctggtgcttcctggctacaagtacctcggacccttcaacggactcgacaagggggagcccgtcaacgcggcggacgcagcggccctcgagcacgacaaggcctacgaccagcagctcaaagcgggtgacaatccgtacctgcggtataaccacgccgacgccgagtttcaggagcgtctgcaagaagatacgtcttttgggggcaacctcgggcgagcagtcttccaggccaagaagcgggttctcgaacctctcggtctggttgaggaaggcgctaagacggctcctggaaagaagagaccggtagagccatcacctcagcgttcccccgactcctccacgggcatcggcaagaaaggccaccagcccgcgagaaagagactgaactttgggcagactggcgactcggagtcagtccccgaccctcaaccaatcggagaaccaccagcaggcccctctggtctgggatctggtacaatggctgcaggcggtggcgctccaatggcagacaataacgaaggcgccgacggagtgggtagttcctcaggaaattggcattgcgattccacatggctgggcgacagagtcatcaccaccagcacccgaacctgggccctgcccacctacaacaaccatctctacaagcaaatctccaacgggacatcgggaggaagcactaacgacaacacctactttggctacagcaccccctgggggtattttgacttcaacagattccactgccacttctcaccacgtgactggcagcgactcatcaacaataactggggattccggcccaagagactcaacttcaagctcttcaacatccaggtcaaggaggtcacgcagaatgaaggcaccaagaccatcgccaataaccttaccagcacgattcaggtgtttacggactcggaataccagctcccgtacgtcctcggctctgcgcaccagggctgcctccctccgttcccggcggacgtcttcatgattcctcagtacgggtatctgaccctaaacaatggcagtcaggctgtgggccgttcctccttctactgcctggaatacttcccttctcaaatgctgaggacgggcaacaactttgaattcagctacaccttcgaggacgtgcctttccacagcagctacgcgcacagccagagcctggaccggctgatgaaccctctcatcgaccagtacctgtattacttatccagaactcagtccacaggaggaactcaaggtactcagcaattgttattttctcaagccgggcccgcaaacatgtcggctcaggccaagaactggctacctggaccgtgttaccgtcagcaacgagtttccacgacactgtcgcaaaacaacaacagcaattttgcttggaccggtgccaccaagtatcacctgaatggcagagactccctggttaatcccggcgttgccatggctacccacaaggacgacgaggagcgcttcttcccgtcaagcggagttctaatgtttggcaagcagggggctggaaaagacaatgtggactacagcagcgtgatgctcaccagcgaagaagaaattaaaactactaacccagtggctacagagcagtatggtgtggtggcagacaacctgcagcagaccaacggagctcccattgtgggaactgtcaacagccagggggccttacctggtatggtctggcaaaaccgggacgtgtacctgcagggccccatctgggccaaaattcctcacacggacggcaactttcatccttcgccgctgatgggaggctttggactgaaacacccgcctcctcagatcctggtgaaaaacactcctgttcctgcggatcctccgaccaccttcagccaggccaagctggcttcttttatcacgcagtacagcaccggacaggtcagcgtggaaatcgaatgggagctgcagaaagaaaacagcaagcgctggaacccagagattcagtatacttccaactactacaaatctacaaatgtggactttgctgtcaatactgagggtacttattcagagcctcgccccattggcactcgttatctcacccgtaatctgtaattgcttgttaatcaataaaccggttaattcgtttcagttgaactttggtctctgcgaagggcgaattc

SEQ ID NO: 4742 - protein, 738 aa, Adeno-associated virus
MAADGYLPDWLEDNLSEGIREWWDLKPGAPKPKANQQKQDDGRGLVLPGYKYLGPFNGLDKGEPVNAADAAALEHDKAYDQQLKAGDNPYLRYNHADAEFQERLQEDTSFGGNLGRAVFQAKKRVLEPLGLVEEGAKTAPGKKRPVEPSPQRSPDSSTGIGKKGHQPARKRLNFGQTGDSESVPDPQPIGEPPAGPSGLGSGTMAAGGGAPMADNNEGADGVGSSSGNWHCDSTWLGDRVITTSTRTWALPTYNNHLYKQISNGTSGGSTNDNTYFGYSTPWGYFDFNRFHCHFSPRDWQRLINNNWGFRPKRLNFKLFNIQVKEVTQNEGTKTIANNLTSTIQVFTDSEYQLPYVLGSAHQGCLPPFPADVFMIPQYGYLTLNNGSQAVGRSSFYCLEYFPSQMLRTGNNFEFSYTFEDVPFHSSYAHSQSLDRLMNPLIDQYLYYLSRTQSTGGTQGTQQLLFSQAGPANMSAQAKNWLPGPCYRQQRVSTTLSQNNNSNFAWTGATKYHLNGRDSLVNPGVAMATHKDDEERFFPSSGVLMFGKQGAGKDNVDYSSVMLTSEEEIKTTNPVATEQYGVVADNLQQTNGAPIVGTVNSQGALPGMVWQNRDVYLQGPIWAKIPHTDGNFHPSPLMGGFGLKHPPPQILVKNTPVPADPPTTFSQAKLASFITQYSTGQVSVEIEWELQKENSKRWNPEIQYTSNYYKSTNVDFAVNTEGTYSEPRPIGTRYLTRNL

SEQ ID NO: 4743 - DNA, 3122 bp, Adeno-associated virus
  source 1..3122: mol_type = genomic DNA
gaattcgccctttctacggctgcgtcaactggaccaatgagaactttcccttcaacgattgcgtcgacaagatggtgatctggtgggaggagggcaagatgacggccaaggtcgtggagtccgccaaggccattctcggcggcagcaaggtgcgtgtggaccaaaagtgcaagtcttccgcccagatcgatcccacccccgtgatcgtcacctccaacaccaacatgtgcgccgtgattgacgggaacagcgccaccttcgagcaccagcagccgttgcaggaccggatgttcaaatttgaactcacccgccgtctggagcatgactttggcaaggtgacgaagcaggaagtcaaagagttcttccgctgggcgcaggatcacgtgaccgaggtggcgcatgagttccacgtcagaaagggtggagccaacaagagacccgcccccgatgacgcggatataagcgagcccaagcgggcctgcccctcagtcgcggatccatcgacgtcagacgcggaaggagctccggtggactttgccgacaggtaccaaaacaaatgttctcgtcacgcgggcatgcttcagatgctgtttccctgcaagacatgcgagagaatgaatcagaatttcaacatttgcttcacgcacgggaccagagactgttcagaatgtttccccggcgtgtcagaatctcaaccggtcgtcagaaagaggacgtatcggaaactctgtgcgattcatcatctgctggggcgggctcccgagattgcttgctcggcctgcgatctggtcaacgtggacctggatgactgtgtttctgagcaataaatgacttaaaccaggtatggctgccgatggttatcttccagattggctcgaggacaacctctctgagggcattcgcgagtggtgggacttgaaacctggagccccgaaacccaaagccaaccagcaaaagcaggacgacggccggggtctggtgcttcctggctacaagtacctcggacccttcaacggactcgacaagggggagcccgtcaacgcggcggacgcagcggccctcgagcacgacaaagcctacgaccagcagctcaaagcgggtgacaatccgtacctgcggtataatcacgccgacgccgagtttcaggagcgtctgcaagaagatacgtcttttgggggcaacctcgggcgagcagtcttccaggccaagaagcgggttctcgaacctctcggtctggttgaggaaggcgctaagacggctcctggaaagaagagactggtagagcagtcgccacaagagccagactcctcctcgggcatcggcaagacaggccagcagcccgctaaaaagagactcaattttggtcagactggcgactcagagtcagtccccgacccacaacctctcggagaacctccagcagccccctcaggtctgggacctaatacaatggcttcaggcggtggcgctccaatggcagacaataacgaaggcgccgacggagtgggtaattcctcgggaaattggcattgcgattccacatggctgggggacagagtcatcaccaccagcacccgaacctgggccctgcccacctacaacaaccacctctacaagcaaatctccaacggcacctcgggaggaagcaccaacgacaacacctattttggctacagcaccccctgggggtattttgacttcaacagattccactgtcacttttcaccacgtgactggcaacgactcatcaacaacaattggggattccggcccaaaagactcaacttcaagctgttcaacatccaggtcaaggaagtcacgacgaacgaaggcaccaagaccatcgccaataatctcaccagcaccgtgcaggtctttacggactcggagtaccagttaccgtacgtgctaggatccgctcaccagggatgtctgcctccgttcccggcggacgtcttcacggttcctcagtacggctatttaactttaaacaatggaagccaagccctgggacgttcctccttctactgtctggagtatttcccatcgcagatgctgagaaccggcaacaactttcagttcagctacaccttcgaggacgtgcctttccacagcagctacgcgcacagccagagcctggacaggctgatgaatcccctcatcgaccagtacctgtactacctggtcagaacgcaaacgactggaactggagggacgcagactctggcattcagccaagcgggtcctagctcaatggccaaccaggctagaaattgggtgcccggaccttgctaccggcagcagcgcgtctccacgacaaccaaccagaacaacaacagcaactttgcctggacgggagctgccaagtttaagctgaacggccgagactctctaatgaatccgggcgtggcaatggcttcccacaaggatgacgacgaccgcttcttcccttcgagcggggtcctgatttttggcaagcaaggagccgggaacgatggagtggattacagccaagtgctgattacagatgaggaagaaatcaaggctaccaaccccgtggccacagaagaatatggagcagtggccatcaacaaccaggccgccaatacgcaggcgcagaccggactcgtgcacaaccagggggtgattcccggcatggtgtggcagaatagagacgtgtacctgcagggtcccatctgggccaaaattcctcacacggacggcaactttcacccgtctcccctgatgggcggctttggactgaagcacccgcctcctcaaattctcatcaagaacacaccggttccagcggacccgccgcttaccttcaaccaggccaagctgaactctttcatcacgcagtacagcaccggacaggtcagcgtggaaatcgagtgggagctgcagaaagaaaacagcaaacgctggaatccagagattcaatacacttccaactactacaaatctacaaatgtggactttgctgtcaacacggaaggagtttatagcgagcctcgccccattggcacccgttacctcacccgcaacctgtaattacatgttaatcaataaaccggttaattcgtttcagttgaactttggtctctgcgaagggcgaattc

SEQ ID NO: 4744 - protein, 736 aa, Adeno-associated virus
MAADGYLPDWLEDNLSEGIREWWDLKPGAPKPKANQQKQDDGRGLVLPGYKYLGPFNGLDKGEPVNAADAAALEHDKAYDQQLKAGDNPYLRYNHADAEFQERLQEDTSFGGNLGRAVFQAKKRVLEPLGLVEEGAKTAPGKKRLVEQSPQEPDSSSGIGKTGQQPAKKRLNFGQTGDSESVPDPQPLGEPPAAPSGLGPNTMASGGGAPMADNNEGADGVGNSSGNWHCDSTWLGDRVITTSTRTWALPTYNNHLYKQISNGTSGGSTNDNTYFGYSTPWGYFDFNRFHCHFSPRDWQRLINNNWGFRPKRLNFKLFNIQVKEVTTNEGTKTIANNLTSTVQVFTDSEYQLPYVLGSAHQGCLPPFPADVFTVPQYGYLTLNNGSQALGRSSFYCLEYFPSQMLRTGNNFQFSYTFEDVPFHSSYAHSQSLDRLMNPLIDQYLYYLVRTQTTGTGGTQTLAFSQAGPSSMANQARNWVPGPCYRQQRVSTTTNQNNNSNFAWTGAAKFKLNGRDSLMNPGVAMASHKDDDDRFFPSSGVLIFGKQGAGNDGVDYSQVLITDEEEIKATNPVATEEYGAVAINNQAANTQAQTGLVHNQGVIPGMVWQNRDVYLQGPIWAKIPHTDGNFHPSPLMGGFGLKHPPPQILIKNTPVPADPPLTFNQAKLNSFITQYSTGQVSVEIEWELQKENSKRWNPEIQYTSNYYKSTNVDFAVNTEGVYSEPRPIGTRYLTRNL

SEQ ID NO: 4745 - DNA, 3117 bp, Adeno-associated virus
  source 1..3117: mol_type = genomic DNA
gaattcgcccttggctgcgtcaactggaccaatgagaactttcccttcaacgattgcgtcgacaagatggtgatctggtgggaggagggcaagatgacggccaaggtcgtggagtccgccaaggccattctcggcggcagcaaggtgcgtgtggaccaaaagtgcaagtcttccgcccagatcgatcccacccccgtgatcgtcacctccaacaccaacatgtgcgccgtgattgacgggaacagcaccaccttcgagcaccagcagccgttgcaggaccggatgttcaaatttgaactcacccgccgtctggagcatgactttggcaaggtgacgaagcaggaagtcaaagagttcttccgctgggcgcaggatcacgtgaccgaggtggcgcatgagttccacgtcagaaagggtggagccaacaagagacccgcccccgatgacgcggatataagcgagcccaagcgggcctgcccctcagtcgcggatccatcgacgtcagacgcggaaggagctccggtggactttgccgacaggtaccaaaacaaatgttctcgtcacgcgggcatgcttcagatgctgtttccctgcaagacatgcgagagaatgaatcagaatttcaacatttgcttcacgcacgggaccagagactgttcagaatgtttccccggcgtgtcagaatctcaaccggtcgtcagaaagaggacgtatcggaaactctgtgcgattcatcatctgctggggcgggctcccgagattgcttgctcggcctgcgatctggtcaacgtggacctggatgactgtgtttctgagcaataaatgacttaaaccaggtatggctgccgatggttatcttccagattggctcgaggacaacctctctgagggcattcgcgagtggtgggacttgaaacctggagccccgaaacccaaagccaaccagcaaaagcaggacgacggccggggtctggtgcttcctggctacaagtacctcggacccttcaacggactcgacaagggggagcccgtcaacgcggcggacgcagcggccctcgagcacgacaaagcctacgaccagcagctcaaagcgggtgacaatccgtacctgcggtataatcacgccgacgccgagtttcaggagcgtctgcaagaagatacgtcttttgggggcaacctcgggcgagcagtcttccaggccaagaagcgggttctcgaacctctcggtctggttgaggaaggcgctaagacggctcctggaaagaagagaccggtagagcagtcgccacaagagccagactcctcctcgggcatcggcaagacaggccagcagcccgctaaaaagagactcaattttggtcagactggcgactcagagtcagtccccgacccacaacctctcggagaacctccagcagccccctcaggtctgggacctaatacaatggcttcaggcggtggcgctccaatggcagacaataacgaaggcgccgacggagtgggtaattcctcgggaaattggcattgcgattccacatggctgggggacagagtcatcaccaccagcacccgaacctgggccctgcccacctacaacaaccacctctacaagcaaatctccaacggcacctcgggaggaagcaccaacgacaacacctattttggctacagcaccccctgggggtattttgacttcaacagattccactgtcacttttcaccacgtgactggcaacgactcatcaacaacaattggggattccggcccaaaagactcaacttcaagctgttcaacatccaggtcaaggaagtcacgacgaacgaaggcaccaagaccatcgccaataatctcaccagcaccgtgcgggtctttacggactcggagtaccagttaccgtacgtgctaggatccgctcaccagggatgtctgcctccgttcccggcggacgtcttcatggttcctcagtacggctatttaactttaaacaatggaagccaagccctgggacgttcctccttctactgtctggagtatttcccatcgcagatgctgagaaccggcaacaactttcagttcagctacaccttcgaggacgtgcctttccacagcagctacgcgcacagccagagcctggacaggctgatgaatcccctcatcgaccagtacctgtactacctggtcagaacgcaaacgactggaactggagggacgcagactctggcattcagccaagcgggtcctagctcaatggccaaccaggctagaaattgggtgcccggaccttgctaccggcagcagcgcgtctccacgacaaccaaccagagcaacaacagcaactttgcctggacgggagctgccaagtttaagctgaacggccgagactctctaatgaatccgggcgtggcaatggcttcccacaaggatgacgacgaccgcttcttcccttcgagcggggtcctgatttttggcaagcaaggagccgggaacgatggagtggattacagccaagtgctgattacagatgaggaagaaatcaaggctaccaaccccgtggccacagaagaatatggagcagtggccatcaacaaccaggccgccaatacgcaggcgcagaccggactcgtgcacaaccagggggtgattcccggcatggtgtggcagaatagagacgtgtacctgcagggtcccatctgggccaaaattcctcacacggacggcaactttcacccgtctcccctgatgggcggctttggactgaagcacccgcctcctcaaattctcatcaagaacacaccggttccagcggacccgccgcttaccttcaaccaggccaagctgaactctttcatcacgcagtacagcaccggacaggtcagcgtggaaatcgagtgggagctgcagaaagaaaacagcaaacgctggaatccagagattcaatacacttccaactactacaaatctacaaatgtggactttgctgtcaacacggaaggagtttatagcgagcctcgccccattggcacccgttacctcacccgcaacctgtaattacatgttaatcaataaaccggttaattcgtttcagttgaactttggtctctgcgaagggcgaattc

SEQ ID NO: 4746 - protein, 736 aa, Adeno-associated virus
MAADGYLPDWLEDNLSEGIREWWDLKPGAPKPKANQQKQDDGRGLVLPGYKYLGPFNGLDKGEPVNAADAAALEHDKAYDQQLKAGDNPYLRYNHADAEFQERLQEDTSFGGNLGRAVFQAKKRVLEPLGLVEEGAKTAPGKKRPVEQSPQEPDSSSGIGKTGQQPAKKRLNFGQTGDSESVPDPQPLGEPPAAPSGLGPNTMASGGGAPMADNNEGADGVGNSSGNWHCDSTWLGDRVITTSTRTWALPTYNNHLYKQISNGTSGGSTNDNTYFGYSTPWGYFDFNRFHCHFSPRDWQRLINNNWGFRPKRLNFKLFNIQVKEVTTNEGTKTIANNLTSTVRVFTDSEYQLPYVLGSAHQGCLPPFPADVFMVPQYGYLTLNNGSQALGRSSFYCLEYFPSQMLRTGNNFQFSYTFEDVPFHSSYAHSQSLDRLMNPLIDQYLYYLVRTQTTGTGGTQTLAFSQAGPSSMANQARNWVPGPCYRQQRVSTTTNQSNNSNFAWTGAAKFKLNGRDSLMNPGVAMASHKDDDDRFFPSSGVLIFGKQGAGNDGVDYSQVLITDEEEIKATNPVATEEYGAVAINNQAANTQAQTGLVHNQGVIPGMVWQNRDVYLQGPIWAKIPHTDGNFHPSPLMGGFGLKHPPPQILIKNTPVPADPPLTFNQAKLNSFITQYSTGQVSVEIEWELQKENSKRWNPEIQYTSNYYKSTNVDFAVNTEGVYSEPRPIGTRYLTRNL

SEQ ID NO: 4747 - DNA, 3121 bp, Adeno-associated virus
  source 1..3121: mol_type = genomic DNA
gaattcgcccttctacggctgcgtcaactggaccaatgagaactttcccttcaacgattgcgtcgacaagatggtgatctggtgggaggagggcaagatgacggccaaggtcgtggagtccgccaaggccattctcggcggcagcaaggtgcgtgtggaccaaaagtgcaagtcttccgcccagatcgatcccacccccgtgatcgtcacctccaacaccaacatgtgcgccgtgattgacgggaacagcaccaccttcgagcaccagcagccgttgcaggaccggatgttcaaatttgaactcacccgccgtctggagcatgactttggcaaggtgacgaagcaggaagtcaaagagttcttccgctgggcgcaggatcacgtgaccgaggtggcgcatgagttccacgtcagaaagggtggcgccaacaagagacccgcccccgatgacgcggatataagcgagcccaagcgggcctgcccctcagtcgcggatccatcgacgtcagacgcggaaggagctccggtggactttgccgacaggtaccaaaacaaatgttctcgtcacgcgggcatgcttcagatgctgtttccctgcaagacatgcgagagaatgaatcagaatttcaacatttgcttcacgcacgggaccagagactgttcagaatgtttccccggcgtgtcagaatctcaaccggtcgtcagaaagaggacgtatcggaaactctgtgcgattcatcatctgctggggcgggctcccgagattgcttgctcggcctgcgatctggtcaacgtggacctggatgactgtgtttctgagcaataaatgacttaaaccaggtatggctgccgatggttatcttccagattggctcgaggacaacctctctgagggcattcgcgagtggtgggacttgaaacctggagccccgaaacccaaagccaaccagcaaaagcaggacgacggccggggtctggtgcttcctggctacaagtacctcggacccttcaacggactcgacaagggggagcccgtcaacgcggcggacgcagcggccctcgagcacgacaaagcctacgaccagcagctcaaagcgggtgacaatccgtacctgcggtataatcacgccgacgccgagtttcaggagcgtctgcaagaagatacgtcctttgggggcaacctcgggcgagcagtcttccaggccaagaagcgggttctcgaacctctcggtctggttgaggaaggcgctaagacggctcctggaaagaagagaccggtagagcagtcgccacaagagccagactcctcctcgggcatcggcaagacaggccagcagcccgctaaaaagagactcaattttggtcagactggcgactcagagtcagtccccgacccacaacctctcggagaacctccagcagccccctcaggtctgggacctaatacaatggcttcaggcggtggcgctccaatggcagacaataacgaaggcgccgacggagtgggtaattcctcgggaaattggcattgcgattccacatggctgggggacagagtcatcaccaccagcacccgaacctgggccctgcccacctacaacaaccacctctacaagcaaatctccaacggcacctcgggaggaagcaccaacgacaacacctattttggctacagcaccccctgggggtattttgacttcaacagattccactgtcacttttcaccacgtgactggcaacgactcatcaacaacaattggggattccggcccaaaagactcaacttcaagctgttcaacatccaggtcaaggaagtcacgacgaacgaaggcaccaagaccatcgccaataatctcaccagcaccgtgcaggtctttacggacttggagtaccagttaccgtacgtgctaggatccgctcaccagggatgtctgcctccgttcccggcggacgtcttcatggttcctcagtacggctatttaactttaaacaatggaagccaagccctgggacgttcctccttctactgtctggagtatttcccatcgcagatgccgagaaccggcaacaactttcagttcagctacaccttcgaggacgtgcctttccacagcagctacgcgcacagccagagcctggacaggctgatgaatcccctcatcgaccagtacctgtactacctggtcagaacgcaaacgactggaactggagggacgcagactctggcattcagccaagcgggtcctagctcaatggccaaccaggctagaaattgggtgcccggaccttgctaccggcagcagcgcgtctccacgacaaccaaccagaacaacaacagcaactttgcctggacgggagctgccaagtttaagctgaacggccgagactctctaatgaatccgggcgtggcaatggcttcccacaaggatgacgacgaccgcttcttcccttcgagcggggtcctgatttttggcaagcaaggagccgggaacgatggagtggattacagccaagtgctgattacagatgaggaagaaatcaaggctaccaaccccgtggccacagaagaatatggagcagtggccatcaacaaccaggccgccaatacgcaggcgcagaccggactcgtgcacaaccagggggtgattcccggcatggtgtggcagaatagagacgtgtacctgcagggtcccatctgggccaaaattcctcacacggacggcaactttcacccgtctcccctgatgggcggctttggactgaagcacccgcctcctcaaattctcatcaagaacacaccggttccagcggacccgccgcttaccttcaaccaggccaagctgaactctttcatcacgcagtacagcaccggacaggtcagcgtggaaatcgagtgggagctgcagaaagaaaacagcaaacgctggaatccagagattcaatacacttccaactactacaaatctacaaatgtggactttgctgtcaacacggaaggagtttatagcgagcctcgccccattggcacccgttacctcacccgcaacctgtaattacatgttaatcaataaaccggttaattcgtttcagttgaactttggtctctgcgaagggcgaattc

SEQ ID NO: 4748 - protein, 736 aa, Adeno-associated virus
MAADGYLPDWLEDNLSEGIREWWDLKPGAPKPKANQQKQDDGRGLVLPGYKYLGPFNGLDKGEPVNAADAAALEHDKAYDQQLKAGDNPYLRYNHADAEFQERLQEDTSFGGNLGRAVFQAKKRVLEPLGLVEEGAKTAPGKKRPVEQSPQEPDSSSGIGKTGQQPAKKRLNFGQTGDSESVPDPQPLGEPPAAPSGLGPNTMASGGGAPMADNNEGADGVGNSSGNWHCDSTWLGDRVITTSTRTWALPTYNNHLYKQISNGTSGGSTNDNTYFGYSTPWGYFDFNRFHCHFSPRDWQRLINNNWGFRPKRLNFKLFNIQVKEVTTNEGTKTIANNLTSTVQVFTDLEYQLPYVLGSAHQGCLPPFPADVFMVPQYGYLTLNNGSQALGRSSFYCLEYFPSQMPRTGNNFQFSYTFEDVPFHSSYAHSQSLDRLMNPLIDQYLYYLVRTQTTGTGGTQTLAFSQAGPSSMANQARNWVPGPCYRQQRVSTTTNQNNNSNFAWTGAAKFKLNGRDSLMNPGVAMASHKDDDDRFFPSSGVLIFGKQGAGNDGVDYSQVLITDEEEIKATNPVATEEYGAVAINNQAANTQAQTGLVHNQGVIPGMVWQNRDVYLQGPIWAKIPHTDGNFHPSPLMGGFGLKHPPPQILIKNTPVPADPPLTFNQAKLNSFITQYSTGQVSVEIEWELQKENSKRWNPEIQYTSNYYKSTNVDFAVNTEGVYSEPRPIGTRYLTRNL

SEQ ID NO: 4749 - DNA, 3122 bp, Adeno-associated virus
  source 1..3122: mol_type = genomic DNA
gaattcgccctttctacggctgcgtcaactggaccaatgagaactttcccttcaacgattgcgtcgacaagatggtgatctggtgggaggagggcaagatgacggccaaggtcgtggagtccgccaaggccattctcggcggcagcaaggtgcgtgtggaccaaaagtgcaagtcttccgcccagatcgatcccacccccgtgatcgtcacctccaacaccaacatgtgcgccgtgattgacgggaacagcaccaccttcgagcaccagcagccgttgcaggaccggatgttcaaatttgaactcacccgccgtctggagcatgactttggcaaggtgacgaagcaggaagtcaaagggttcttccgctgggcgcaggatcacgtgaccgaggtggcgcatgagttccacgtgcgagcccaagcgggcctgcccctcagtcgcggatccatcgacgtcagaccagaaagggtggagccaacaagagacccgcccccgatgacgcggatataagcggaaggagctccggtggactttgccgacaggtaccaaaacaaatgttctcgtcacgcgggcatgcttcagatgctgtttccctgcaagacatgcgagagaatgaatcagaatttcaacatttgcttcacgcacgggaccagagactgttcagaatgtttccccggcgtgtcagaatctcaaccggtcgtcagaaagaggacgtatcggaaactctgtgcgattcatcatctgctggggcgggctcccgagattgcttgctcggcctgcgatctggtcaacgtggacctggatgactgtgtttctgagcaataaatgacttaaaccaggtatggctgccgatggttatcttccagattggctcgaggacaacctctctgagggcattcgcgagtggtgggacttgaaacctggagccccgaaacccaaagccaaccagcaaaagcaggacgacggccggggtctggtgcttcctggctacaagtacctcggacccttcaacggactcgacaagggggagcccgtcaacgcggcggacgcagcggccctcgagcacgacaaagcctacgaccagcagctcaaagcgggtgacaatccgtacctgcggtataatcacgccgacgccgagtttcaggagcgtctgcaagaagatacgtcttttgggggcaacctcgggcgagcagtcttccaggccaagaagcgggttctcgaacctctcggtctggttgaggaaggcgctaagacggctcctggaaagaagagaccggtagagcagtcgccacaagagccagactcctcctcgggcatcggcaagacaggccagcagcccgctaaaaagagactcaattttggtcagactggcgactcagagtcagtccccgacccacaacctctcggagaacctccagcagccccctcaggtctgggacctaatacaatggcttcaggcggtggcgctccaatggcagacaataacgaaggcgccgacggagtgggtaattcctcgggaaattggcattgcgattccacatggctgggggacagagtcatcaccaccagcacccgaacctgggccctgcccacctacaacaaccacctctacaagcaaatctccaacggcacctcgggaggaagcaccaacgacaacacctattttggctacagcaccccctgggggtattttgacttcaacagattccactgtcacttttcaccacgtgactggcaacgactcatcaacaacaattggggattccggcccaaaagactcaacttcaagctgttcaacatccaggtcaaggaagtcacgacgaacgaaggcaccaagaccatcgccaataatctcaccagcaccgtgcaggtctttacggactcggagtaccagttaccgtacgtgctaggatccgctcaccagggatgtctgcctccgttcccggcggacgtcttcatggttcctcagtacggctatttaactttaaacaatggaagccaagccctgggacgttcctccttctactgtctggagtatttcccatcgcagatgctgagaaccggcaacaactttcagttcagctacaccttcgaggacgtgcctttccacagcagctacgcgcacagccagagcctggacaggctgatgaatcccctcatcgaccagtacctgtactacctggtcagaacgcaaacgactggaactggagggacgcagactctggcattcagccaagcgggtcctagctcaatggccaaccaggctagaaattgggtgcccggaccttgctaccggcagcagcgcgtctccacgacaaccaaccagaacaacaacagcaactttgcctggacgggagctgccaagtttaagctgaacggccgagactctctaatgaatccgggcgtggcaatggcttcccacaaggatgacgacgaccgcttcttcccttcgagcggggtcctgatttttggcaagcaaggagccgggaacgatggagtggattacagccaagtgctgattacagatgaggaagaaatcaaggctaccaaccccgtggccacagaagaatatggagcagtggccatcaacaaccaggccgccaatacgcaggcgcagaccggactcgtgcacaaccagggggtgattcccggcatggtgtggcagaatagagacgtgtacctgcagggtcccatctgggccaaaattcctcacacggacggcaactttcacccgtctcccctgatgggcggctttggactgaagcacccgcctcctcaaattctcatcaagaacacaccggttccagcggacccgccgcttaccttcaaccaggccaagctgaactctttcatcacgcagtacagcaccggacaggtcagcgtggaaatcgagtgggagctgcagaaagaaaacagcaaacgctggaatccagagattcaatacacttccaactactacaaatctacaaatgtggactttgctgtcaacacggagggggtttatagcgagcctcgccccattggcacccgttacctcacccgcaacctgtaattacatgttaatcaataaaccggttaattcgtttcagttgaactttggtctctgcgaagggcgaattc

SEQ ID NO: 4750 - protein, 736 aa, Adeno-associated virus
MAADGYLPDWLEDNLSEGIREWWDLKPGAPKPKANQQKQDDGRGLVLPGYKYLGPFNGLDKGEPVNAADAAALEHDKAYDQQLKAGDNPYLRYNHADAEFQERLQEDTSFGGNLGRAVFQAKKRVLEPLGLVEEGAKTAPGKKRPVEQSPQEPDSSSGIGKTGQQPAKKRLNFGQTGDSESVPDPQPLGEPPAAPSGLGPNTMASGGGAPMADNNEGADGVGNSSGNWHCDSTWLGDRVITTSTRTWALPTYNNHLYKQISNGTSGGSTNDNTYFGYSTPWGYFDFNRFHCHFSPRDWQRLINNNWGFRPKRLNFKLFNIQVKEVTTNEGTKTIANNLTSTVQVFTDSEYQLPYVLGSAHQGCLPPFPADVFMVPQYGYLTLNNGSQALGRSSFYCLEYFPSQMLRTGNNFQFSYTFEDVPFHSSYAHSQSLDRLMNPLIDQYLYYLVRTQTTGTGGTQTLAFSQAGPSSMANQARNWVPGPCYRQQRVSTTTNQNNNSNFAWTGAAKFKLNGRDSLMNPGVAMASHKDDDDRFFPSSGVLIFGKQGAGNDGVDYSQVLITDEEEIKATNPVATEEYGAVAINNQAANTQAQTGLVHNQGVIPGMVWQNRDVYLQGPIWAKIPHTDGNFHPSPLMGGFGLKHPPPQILIKNTPVPADPPLTFNQAKLNSFITQYSTGQVSVEIEWELQKENSKRWNPEIQYTSNYYKSTNVDFAVNTEGVYSEPRPIGTRYLTRNL

SEQ ID NO: 4751 - DNA, 2370 bp, Adeno-associated virus
  source 1..2370: mol_type = genomic DNA
gaattcgccctttctacggctgcgtcaactggaccaatgagaactttcccttcaacgattgcgtcgacaagatggtgatctggtgggaggagggcaagatgacggccaaggtcgtggagtccgccaaggccattctcggcggcagcaaggtgcgcgtggaccaaaagtgcaagtcgtccgcccagatcgaccccacccccgtgatcgtcacctccaacaccaacatgtgcgccgtgattgacgggaacagcaccaccttcgagcaccagcagccgttgcaggaccggatgttcaagttcgaactcacccgccgtctggagcacgactttggcaaggtgaccaagcaggaagtcaaagagttcttccgctgggcgcaggatcacgtgaccgaggtggcgcatgagttctacgtcagaaagggcggagccagcaaaagacccgcccccgatgacgcggatataagcgagcccaagcgggcctgcccctcagtcgcggatccatcgacgtcagacgcggaaggagctccggtggactttgccgacaggtaccaaaacaaatgttctcgtcacgcgggcatgcttcagacgctgtttccctgcaaaacgtgcgagagaatgaatcagaatttcaacatttgcttcacgcacggggtcagagactgctcagaatgtttccccggtgcatcagaatctcaaccggtcgtcagaaaaaaaacgtatcagaaactgtgtgccattcatcatctgctggggcgggcacccgagattgcttgctcggcctgcgatctggtcaacgtggacctggacgactgtgtttctgagcaataaatgacttaaaccaggtatggctgccgatggttatcttccagattggcttgaggacaacctctctgagggcattcgcgagtggtgggacctgaaacctggagccccgaaacccaaagccaaccagcaaaagcaggacgacggccggggtctggtgcttcctggctacaagtacctcggacccttcaacggactcgacaagggggagcccgtcaacgcggcggacgcagcggccctcgagcacgacaaggcctacgaccagcagctcaaagcgggtgacaatccgtacctgcggtataaccacgccgacgccgagtttcaggagcgtctgcaagaagatacgtcttttgggggcaacctcgggcgagcagtcttccaggccaagaagcgggttctcgaacctctcggtctggttgaggaaggcgctaagacggctcctggaaagaagagaccggtagagccatcacctcagcgttcccccgactcctccacgggcatcggcaagaaaggccaccagcccgcgagaaagagactgaactttgggcagactggcgactcggagtcagtccccgaccctcaaccaatcggagaaccaccagcaggcccctctggtctgggatctggtacaatggctgcaggcggtggcgctccaatggcagacaataacgaaggcgccgacggagtgggtagttcctcaggaaattggcattgcgattccacatggctgggcgacagagtcatcaccaccagcacccgaacctgggccctgcccacctacaacaaccatctctacaagcaaatctccaacgggacatcgggaggaagcactaacgacaacacctactttggctacagcaccccctgggggtattttgacttcaacagattccactgccacttctcaccacgtgactggcagcgactcatcaacaataactggggattccggcccaagagactcaacttcaagctcttcaacatccaggtcaaggaggtcacgcagaatgaaggcaccaagaccatcgccaataaccttaccagcacgattcaggtgtttacggactcggaataccagctcccgtacgtcctcggctctgcgcaccagggctgcctccctccgttcccggcggacgtcttcatgattcctcagtacgggtatctgaccctaaacaatggcagtcaggctgtgggccgttcctccttctactgcctggaatacttcccttctcaaatgctgaggacgggcaacaactttgaattcagctacaccttcgaggacgtgcctttccacagcagctacgcgcacagccagagcctggaccggctgatgaaccctctcatcgaccagtacctgtattacttatccagaactcagtccacaggaggaactcaaggtactcagcaattgttattttctcaagccgggcccgcaaacatgtyggctcaggccaagaactggctacctggaccgtgttaccgtcagcaacgagtttccacgacactgtcgcaaaacaacaacagcaattttgctggaccggtgccacca

SEQ ID NO: 4752 - protein, 738 aa, Adeno-associated virus; identical to SEQ ID NO: 4742

SEQ ID NO: 4753 - DNA, 2205 bp, Adeno-associated virus
  source 1..2205: mol_type = genomic DNA
atgactgacggttaccttccagattggctagaggacaacctctctgaaggcgttcgagagtggtgggcgctgcaacctggagcccctaaacccaaggcaaatcaacaacatcaggacaacgctcggggtcttgtgcttccgggttacaaatacctcggacccggcaacggactcgacaagggggaacccgtcaacgcagcggacgcggcagccctcgagcacgacaaggcctacgaccagcagctcaaggccggtgacaacccctacctcaagtacaaccacgccgacgcggagttccagcagcggcttcagggcgacacatcgtttgggggcaacctcggcagagcagtcttccaggccaaaaagagggttcttgaacctcttggtctggttgagcaagcgggtgagacggctcctggaaagaagagaccgttgattgaatccccccagcagcccgactcctccacgggtatcggcaaaaaaggcaagcagccggctaaaaagaagctcgttttcgaagacgaaactggagcaggcgacggaccccctgagggatcaacttccggagccatgtctgatgacagtgagatgcgtgcagcagctggcggagctgcagtcgagggcggacaaggtgccgatggagtgggtaatgcctcgggtgattggcattgcgattccacctggtctgagggccacgtcacgaccaccagcaccagaacctgggtcttgcccacctacaacaaccacctctacaagcgactcggagagagcctgcagtccaacacctacaacggattctccaccccctggggatactttgacttcaaccgcttccactgccacttctcaccacgtgactggcagcgactcatcaacaacaactggggcatgcgacccaaagccatgcgggtcaaaatcttcaacatccaggtcaaggaggtcacgacgtcgaacggcgagacaacggtggctaataaccttaccagcacggttcagatctttgcggactcgtcgtacgaactgccgtacgtgatggatgcgggtcaagagggcagcctgcctccttttcccaacgacgtctttatggtgccccagtacggctactgtggactggtgaccggcaacacttcgcagcaacagactgacagaaatgccttctactgcctggagtactttccttcgcagatgctgcggactggcaacaactttgaaattacgtacagttttgagaaggtgcctttccactcgatgtacgcgcacagccagagcctggaccggctgatgaaccctctcatcgaccagtacctgtggggactgcaatcgaccaccaccggaaccaccctgaatgccgggactgccaccaccaactttaccaagctgcggcctaccaacttttccaactttaaaaagaactggctgcccgggccttcaatcaagcagcagggcttctcaaagactgccaatcaaaactacaagatccctgccaccgggtcagacagtctcatcaaatacgagacgcacagcactctggacggaagatggagtgccctgacccccggacctccaatggccacggctggacctgcggacagcaagttcagcaacagccagctcatctttgcggggcctaaacagaacggcaacacggccaccgtacccgggactctgatcttcacctctgaggaggagctggcagccaccaacgccaccgatacggacatgtggggcaacctacctggcggtgaccagagcaacagcaacctgccgaccgtggacagactgacagccttgggagccgtgcctggaatggtctggcaaaacagagacatttactaccagggtcccatttgggccaagattcctcataccgatggacactttcacccctcaccgctgattggtgggtttgggctgaaacacccgcctcctcaaatttttatcaagaacaccccggtacctgcgaatcctgcaacgaccttcagctctactccggtaaactccttcattactcagtacagcactggccaggtgtcggtgcagattgactgggagatccagaaggagcggtccaaacgctggaaccccgaggtccagtttacctccaactacggacagcaaaactctctgttgtgggctcccgatgcggctgggaaatacactgagcctagggctatcggtacccgctacctcacccaccacctgtaa

SEQ ID NO: 4754 - protein, 734 aa, Adeno-associated virus
MTDGYLPDWLEDNLSEGVREWWALQPGAPKPKANQQHQDNARGLVLPGYKYLGPGNGLDKGEPVNAADAAALEHDKAYDQQLKAGDNPYLKYNHADAEFQQRLQGDTSFGGNLGRAVFQAKKRVLEPLGLVEQAGETAPGKKRPLIESPQQPDSSTGIGKKGKQPAKKKLVFEDETGAGDGPPEGSTSGAMSDDSEMRAAAGGAAVEGGQGADGVGNASGDWHCDSTWSEGHVTTTSTRTWVLPTYNNHLYKRLGESLQSNTYNGFSTPWGYFDFNRFHCHFSPRDWQRLINNNWGMRPKAMRVKIFNIQVKEVTTSNGETTVANNLTSTVQIFADSSYELPYVMDAGQEGSLPPFPNDVFMVPQYGYCGLVTGNTSQQQTDRNAFYCLEYFPSQMLRTGNNFEITYSFEKVPFHSMYAHSQSLDRLMNPLIDQYLWGLQSTTTGTTLNAGTATTNFTKLRPTNFSNFKKNWLPGPSIKQQGFSKTANQNYKIPATGSDSLIKYETHSTLDGRWSALTPGPPMATAGPADSKFSNSQLIFAGPKQNGNTATVPGTLIFTSEEELAATNATDTDMWGNLPGGDQSNSNLPTVDRLTALGAVPGMVWQNRDIYYQGPIWAKIPHTDGHFHPSPLIGGFGLKHPPPQIFIKNTPVPANPATTFSSTPVNSFITQYSTGQVSVQIDWEIQKERSKRWNPEVQFTSNYGQQNSLLWAPDAAGKYTEPRAIGTRYLTHHL

SEQ ID NO: 4755 - DNA, 3128 bp, Adeno-associated virus
  source 1..3128: mol_type = genomic DNA
gaattcgccctttctacggctgcgtcaactggaccaatgagaactttcccttcaacgattgcgtcgacaagatgttgatctggtgggaggagggcaagatgacggccaaggtcgtggagtccgccaaggccattctcggcggcagcaaagtgcgcgtggaccaaaagtgcaagccgtccgcccagatcgaccccacccccgtgatcgtcacctccaacaccaacatgtgcgccgtgattgacgggaacagcaccaccttcgagcaccagcagccgttgcgggaccggatgttcaagtttgaactcacccgccgtctggagcacgactttggcaaggtgacaaagcaggaagtcagagagttcttccgctgggcgcaggatcacgtgaccgaggtggcgcacgagttctacgtcagaaagggtggagccaacaagagacccgcccccgatgacgcggataaaagcgagcccaagcgggcctgcccctcagtcgcggatccatcgacgtcagacgcggaaggagctccggtggactttgccgacaggtaccaaaacaaatgttctcgtcacgcgggcatgcttcagatgctgtttccctgcaaaacatgcgagagaatgaatcagaatttcaacatttgcttcacgcacgggaccagagactgttcagaatgtttccccggcgtgtcagaatctcaaccggtcgtcagaaaaaagacgtatcggaaactctgtgcgattcatcatctgctggggcgggcacccgagattgcttgctcggcctgcgatctggtcaacgtggacctagatgactgtgtttctgagcaataaatgacttaaaccaggtatggctgccgatggttatcttccagattggctcgaggacaacctctctgagggcattcgcgagtggtgggacttgaaacctggagccccgaaacccaaagccaaccagcaaaagcaggacgacggccggggtctggtgcttcctggctacaagtacctcggacccttcaacggactcgacaagggggagcccgtcaacgcggcggacgcagcggccctcgagcacgacaaggcctacgaccagcagctcaaagcgggtgacaatccgtacctgcggtataaccacgccgacgccgagtttcaggagcgtctgcaagaagatacgtcttttgggggcaacctcgggcgagcagtcttccaggccaagaagcgggttctcgaacctctcggtctggttgaggaaggcgctaagacggctcctggaaagaagagaccggtagagccatcaccccagcgttctccagactcctctacgggcatcggcaagaaaggccagcagcccgcgaaaaagagactcaactttgggcagactggcgactcagagtcagtgcccgaccctcaaccaatcggagaaccccccgcaggcccctctggtctgggatctggtacaatggctgcaggcggtggcgctccaatggcagacaataacgaaggcgccgacggagtgggtagttcctcaggaaattggcattgcgattccacatggctgggcgacagagtcatcaccaccagcacccgaacctgggccctccccacctacaacaaccacctctacaagcaaatctccaacgggacttcgggaggaagcaccaacgacaacacctacttcggctacagcaccccctgggggtattttgactttaacagattccactgccacttctcaccacgtgactggcagcgactcatcaacaacaactggggattccggcccaagagactcaacttcaagctcttcaacatccaggtcaaggaggtcacgcagaatgaaggcaccaagaccatcgccaataaccttaccagcacgattcaggtctttacggactcggaataccagctcccgtacgtcctcggctctgcgcaccagggctgcctgcctccgttcccggcggacgtcttcatgattcctcagtacgggtacctgactctgaacaatggcagtcaggccgtgggccgttcctccttctactgcctggagtactttccttctcaaatgctgagaacgggcaacaactttgagttcagctaccagtttgaggacgtgccttttcacagcagctacgcgcacagccaaagcctggaccggctgatgaaccccctcatcgaccagtacctgtactacctgtctcggactcagtccacgggaggtaccgcaggaactcagcagttgctattttctcaggccgggcctaataacatgtcggctcaggccaaaaactggctacccgggccctgctaccggcagcaacgcgtctccacgacactgtcgcaaaataacaacagcaactgtaaatcccggtgtcgctatggcaacccacaaggacgacgaagagcgattttgcctggaccggtgccaccaagtatcatctgaatggcagagactctctgttttccgtccagcggagtcttaatgtttgggaaacagggagctggaaaagacaacgtggactatagcagcgttatgctaaccagtgaggaagaaattaaaaccaccaacccagtggccacggaacagtacggcgtggtggccgataacctgcaacagcaaaacgccgctcctattgtaggggccgtcaacagtcaaggagccttacctggcatggtctggcagaaccgggacgtgtacctgcagggtcctatctgggccaagattcctcacacggacggaaactttcatccctcgccgctgatgggaggctttggactgaaacacccgcctcctcagatcctgattaagaatacacctgttcccgcggatcctccaactaccttcagtcaagctaagctggcgtcgttcatcacgcagtacagcaccggacaggtcagcgtggaaattgaatgggagctgcagaaagaaaacagcaaacgctggaacccagagattcaatacacttccaactactacaaatctacaaatgtggacttcgctgttaacacagatggcacttattctgagcctcgccccattggcacccgttacctcacccgtaatctgtaattgctcgttaatcaataaaccggttgattcgtttcagttgaactttggtctctgcgaagggcgaattc

SEQ ID NO: 4756 - protein, 738 aa, Adeno-associated virus
MAADGYLPDWLEDNLSEGIREWWDLKPGAPKPKANQQKQDDGRGLVLPGYKYLGPFNGLDKGEPVNAADAAALEHDKAYDQQLKAGDNPYLRYNHADAEFQERLQEDTSFGGNLGRAVFQAKKRVLEPLGLVEEGAKTAPGKKRPVEPSPQRSPDSSTGIGKKGQQPAKKRLNFGQTGDSESVPDPQPIGEPPAGPSGLGSGTMAAGGGAPMADNNEGADGVGSSSGNWHCDSTWLGDRVITTSTRTWALPTYNNHLYKQISNGTSGGSTNDNTYFGYSTPWGYFDFNRFHCHFSPRDWQRLINNNWGFRPKRLNFKLFNIQVKEVTQNEGTKTIANNLTSTIQVFTDSEYQLPYVLGSAHQGCLPPFPADVFMIPQYGYLTLNNGSQAVGRSSFYCLEYFPSQMLRTGNNFEFSYQFEDVPFHSSYAHSQSLDRLMNPLIDQYLYYLSRTQSTGGTAGTQQLLFSQAGPNNMSAQAKNWLPGPCYRQQRVSTTLSQNNNSNFAWTGATKYHLNGRDSLVNPGVAMATHKDDEERFFPSSGVLMFGKQGAGKDNVDYSSVMLTSEEEIKTTNPVATEQYGVVADNLQQQNAAPIVGAVNSQGALPGMVWQNRDVYLQGPIWAKIPHTDGNFHPSPLMGGFGLKHPPPQILIKNTPVPADPPTTFSQAKLASFITQYSTGQVSVEIEWELQKENSKRWNPEIQYTSNYYKSTNVDFAVNTDGTYSEPRPIGTRYLTRNL

SEQ ID NO: 4757 - DNA, 3129 bp, Adeno-associated virus
  source 1..3129: mol_type = genomic DNA
gaattcgccctttctacggctgcgtcaactggaccaatgagaactttcccttcaacgattgcgtcgacaagatggtgatctggtgggaggagggcaagatgacggccaaggtcgtggagtccgccaaggccattctcggcggcagcaaagtgcgcgtggaccaaaagtgcaagtcgtccgcccagatcgaccccacccccgtgatcgtcacctccaacaccaacatgtgcgccgtgattgacgggaacagcaccaccttcgagcaccagcagccgttgcaggaccggatgttcaagtttgaactcacccgccgtctggagcacgactttggcaaggtgacaaagcaggaagtcagagagttcttccgctgggcgcaggatcacgtgaccgaggtggcgcacgagttctacgtcagaaagggtggagccaacaagagacccgcccccgatgacgcggataaaagcgagcccaagcgggcctgcccctcagtcgcggatccatcgacgtcagacgcggaaggagctccggtggactttgccgacaggtaccaaaacaaatgttctcgtcacgcgggcatgcttcagatgctgtttccctgcaaaacatgcgagagaatgaatcagaatttcaacatttgcttcacgcacgggaccagagactgttcagaatgtttccccggcgtgtcagaatctcaaccggtcgtcagaaaaaagacgtatcggaaactctgtgcgattcatcatctgctgggggcgggcacccgagattgcttgctcggcctgcgatctggtcaacgtggacctagatgactgtgtttctgagcaataaatgacttaaaccaggtatggctgccgatggttatcttccagattggctcgaggacaacctctctgagggcattcgcgagtggtgggacttgaaacctggagccccgaaacccaaagccaaccagcaaaagcaggacgacggccggggtctggtgcttcctggctacaagtacctcggacccttcaacggactcgacaagggggagcccgtcaacgcggcggacgcagcggccctcgagcacgacaaggcctacgaccagcagctcaaagcgggtgacaatccgtacctgcggtataaccacgccgacgccgagtttcaggagcgtctgcaagaagatacgtcttttgggggcaacctcgggcgagcagtcttccaggccaagaagcgggttctcgaacctctcggtctggttgaggaaggcgctaagacggctcctggaaagaagagaccggtagagccatcaccccagcgttctccagactcctctacgggcatcggcaagaaaggccagcagcccgcgaaaaagagactcaactttgggcagactggcgactcagagtcagtgcccgaccctcaaccaatcggagaaccccccgcaggcccctctggtctgggatctggtacaatggctgcaggcggtggcgctccaatggcagacaataacgaaggcgccgacggagtgggtagttcctcaggaaattggcattgcgattccacatggctgggcgacagagtcatcaccaccagcacccgaacctgggccctccccacctacaacaaccacctctacaagcaaatctccaacgggacttcgggaggaagcaccaacgacaacacctacttcggctacagcaccccctgggggtattttgactttaacagattccactgccacttctcaccacgtgactggcagcgactcatcaacaacaactggggattccggcccaagagactcaacttcaagctcttcaacatccaggtcaaggaggtcacgcagaatgaaggcaccaagaccatcgccaataaccttaccagcacgattcaggtctttacggactcggaataccagctcccgtacgtcctcggctctgcgcaccagggctgcctgcctccgttcccggcggacgtcttcatgattcctcagtacgggtacctgactctgaacaatggcagtcaggccgtgggccgttcctccttctactgcctggagtactttccttctcaaatgctgagaacgggcaacaactttgagttcagctaccagtttgaggacgtgccttttcacagcagctacgcgcacagccaaagcctggaccggctgatgaaccccctcatcgaccagtacctgtactacctgtctcggactcagtccacgggaggtaccgcaggaactcagcagttgctattttctcaggccgggcctaataacatgtcggctcaggccaaaaactggctacccgggccctgctaccggcagcaacgcgtctccacgacactgtcgcaaaataacaacagcaactttgcctggaccggtgccaccaagtatcatctgaatggcagagactctctggtaaatcccggtgtcgctatggcaacccacaaggacgacgaagagcgattttttccgtccagcggagtcttaatgtttgggaaacagggagctggaaaagacaacgtggactatagcagcgttatgctaaccagtgaggaagaaattaaaaccaccaacccagtggccacagaacagtacggcgtggtggccgataacctgcaacagcaaaacgccgctcctattgtaggggccgtcaacagtcaaggagccttacctggcatggtctggcagaaccgggacgtgtacctgcagggtcctatctgggccaagattcctcacacggacggaaactttcatccctcgccgctgatgggaggctttggactgaaacacccgcctcctcagatcctgattaagaatacacctgttcccgcggatcctccaactaccttcagtcaagctaagctggcgtcgttcatcacgcagtacagcaccggacaggtcagcgtggaaattgaatgggagctgcagaaagaaaacagcaaacgctggaacccagagattcaatacacttccaactactacaaatctacaaatgtggactttgctgttaacacagatggcacttattctgagcctcgccccatcggcacccgttacctcacccgtaatctgtaattgcttgttaatcaataaaccggttgattcgtttcagttgaactttggtctctgcgaagggcgaattc

SEQ ID NO: 4758 - DNA, 3128 bp, Adeno-associated virus
  source 1..3128: mol_type = genomic DNA
gaattcgccctttctacggctgcgtcaactggaccaatgagaactttcccttcaacgattgcgtcgacaagatggtgatctggtgggaggagggcaagatgacggccaaggtcgtggagtccgccaaggccattctcggcggcagcaaagtgcgcgtggaccaaaagtgcaagtcgtccgcccagatcgaccccacccccgtgatcgtcacctccaacaccaacatgtgcgccgtgattgacgggaacagcaccaccttcgagcaccagcagccgttgcaggaccggatgttcaagtttgaactcacccgccgtctggagcacgactttggcaaggtgacaaagcaggaagtcagagagttcttccgctgggcgcaggatcacgtgaccgaggtggcgcacgagttctacgtcagaaagggtggagccaacaagagacccgcccccgatgacgcggataaaagcgagcccaagcgggcctgcccctcagtcgcggatccatcgacgtcagacgcggaaggagctccggtggactttgccgacaggtaccaaaacaaatgttctcgtcacgcgggcatgcttcagatgctgtttccctgcaaaacatgcgagagaatgaatcagaatttcaacatttgcttcacgcacgggaccagagactgttcagaatgtttccccggcgtgtcagaatctcaaccggttgtcagaaaaaagacgtatcggaaactctgtgcgattcatcatctgctggggcgggcacccgagattgcttgctcggcctgcgatctggtcaacgtggacctagatgactgtgtttctgagcaataaatgacttaaaccaggtatggctgccgatggttatcttccagattggctcgaggacaacctctctgagggcattcgcgagtggtgggacttgaaacctggagccccgaaacccaaagccaaccagcaaaagcaggacgacggccggggtctggtgcttcctggctacaagtacctcggacccttcaacggactcgacaagggggagcccgtcaacgcggcggacgcagcggccctcgagcacgacaaggcctacgaccagcagctcaaagcgggtgacaatccgtacctgcggtataaccacgccgacgccgagtttcaggagcgtctgcaagaagatacgtcttttgggggcaacctcgggcgagcagtcttccaggccaagaagcgggttctcgaacctctcggtctggttgaggaaggcgctaagacggctcctggaaagaagagaccggtagagccatcaccccagcgttctccagactcctctacgggcatcggcaagaaaggccagcagcccgcgaaaaagagactcaactttgggcagactggcgactcagagtcagtgcccgaccctcaaccaatcggagaaccccccgcaggcccctctggtctgggatctggtacaatggctgcaggcggtggcgctccaatggcagacaataacgaaggcgccgacggagtgggtagttcctcaggaaattggcattgcgattccacatggctgggcgacagagtcatcaccaccagcacccgaacctgggccctccccacctacaacaaccacctctacaagcaaatctccaacgggacttcgggaggaagcaccaacgacaacacctacttcggctacagcaccccctgggggtattttgactttaacagattccactgccacttctcaccacgtgactggcagcgactcatcaacaacaactggggattccggcccaagagacccaacttcaagctcttcaacatccaggtcaaggaggtcacgcagaatgaaggcaccaagaccatcgccaataaccttaccagcacgattcaggtctttacggactcggaataccagctcccgtacgtcctcggctctgcgcaccagggctgcctgcctccgttcccggcggacgtcttcatgattcctcagtacgggtacctgactctgaacaatggcagtcaggccgtgggccgttcctccttctactgcctggagtactttccttctcaaatgctgagaacgggcaacaactttgagttcagctaccagtttgaggacgtgccttttcacagcagctacgcgcacagccaaagcctggaccggctgatgaaccccctcatcgaccagtacctgtactacctgtctcggactcagtccacgggaggtaccgcaggaactcagcagttgctattttctcaggccgggcctaataacatgtcggctcaggccaaaaactggctacccgggccctgctaccggcagcaacgcgtctccacgacactgtcgcaaaataacaacagcaactttgcctggaccggtgccaccaagtatcatctgaatggcagagactctctggtaaatcccggtgtcgctatggcaacccacaaggacgacgaagagcgattttttccgtccagcggagtcttaatgtttgggaaacagggagctggaaaagacaacgtggactatagcagcgttatgctaaccagtgaggaagaaattaaaaccaccaacccagtggccacagaacagtacggcgtggtggccgataacctgcaacagcaaaacgccgctcctattgtaggggccgtcaacagtcaaggagccttacctggcatggtctggcagaaccgggacgtgtacctgcagggtcctatctgggccaagattcctcacacggacggaaactttcatccctcgccgctgatgggaggctttggactgaaacacccgcctcctcagatcctgattaagaatacacctgttcccgcggatcctccaactaccttcagtcaagctaagctggcgtcgttcatcacgcagtacagcaccggacaggtcagcgtggaaattgaatgggagctgcagaaagaaaacagcaaacgctggaacccagagattcaatacacttccaactactacaaatctacaaatgtggactttgctgttaacacagatggcacttattctgagcctcgccccattggcacccgttacctcacccgtaatctgtaattgcttgttaatcaataaaccggttgattcgtttcagttgaactttggtctctgcgaagggcgaattc

SEQ ID NO: 4759 - protein, 738 aa, Adeno-associated virus
MAADGYLPDWLEDNLSEGIREWWDLKPGAPKPKANQQKQDDGRGLVLPGYKYLGPFNGLDKGEPVNAADAAALEHDKAYDQQLKAGDNPYLRYNHADAEFQERLQEDTSFGGNLGRAVFQAKKRVLEPLGLVEEGAKTAPGKKRPVEPSPQRSPDSSTGIGKKGQQPAKKRLNFGQTGDSESVPDPQPIGEPPAGPSGLGSGTMAAGGGAPMADNNEGADGVGSSSGNWHCDSTWLGDRVITTSTRTWALPTYNNHLYKQISNGTSGGSTNDNTYFGYSTPWGYFDFNRFHCHFSPRDWQRLINNNWGFRPKRPNFKLFNIQVKEVTQNEGTKTIANNLTSTIQVFTDSEYQLPYVLGSAHQGCLPPFPADVFMIPQYGYLTLNNGSQAVGRSSFYCLEYFPSQMLRTGNNFEFSYQFEDVPFHSSYAHSQSLDRLMNPLIDQYLYYLSRTQSTGGTAGTQQLLFSQAGPNNMSAQAKNWLPGPCYRQQRVSTTLSQNNNSNFAWTGATKYHLNGRDSLVNPGVAMATHKDDEERFFPSSGVLMFGKQGAGKDNVDYSSVMLTSEEEIKTTNPVATEQYGVVADNLQQQNAAPIVGAVNSQGALPGMVWQNRDVYLQGPIWAKIPHTDGNFHPSPLMGGFGLKHPPPQILIKNTPVPADPPTTFSQAKLASFITQYSTGQVSVEIEWELQKENSKRWNPEIQYTSNYYKSTNVDFAVNTDGTYSEPRPIGTRYLTRNL

SEQ ID NO: 4760 - protein, 738 aa, Adeno-associated virus
MAADGYLPDWLEDNLSEGIREWWDLKPGAPKPKANQQKQDDGRGLVLPGYKYLGPFNGLDKGEPVNAADAAALEHDKAYDQQLKAGDNPYLRYNHADAEFQERLQEDTSFGGNLGRAVFQAKKRVLEPLGLVEEAAKTAPGKKRPVEPSPQRSPDSSTGIGKKGQQPAKKRLNFGQTGDSESVPDPQPIGEPPAGPSGLGSGTMAAGGGAPMADNNEGADGVGSSSGNWHCDSTWLGDRVITTSTRTWALPTYNNHLYKQISNGTSGGSTNDNTYFGYSTPWGYFDFNRFHCHFSPRDWQRLINNNWGFRPKRLSFKLFNIQVKEVTQNEGTKTIANNLTSTIQVFTDSEYQLPYVLGSAHQGCLPPFPADVFMIPQYGYLTLNNGSQAVGRSSFYCLEYFPSQMLRTGNNFEFSYTFEDVPFHSSYAHSQSLDRLMNPLIDQYLYYLSRTQSTGGTQGTQQLLFSQAGPANMSAQAKNWLPGPCYRQQRVSTTLSQNNNSNFAWTGATKYHLNGRDSLVNPGVAMATHKDDEERFFPSSGVLMFGKQGAGRDNVDYSSVMLTSEEEIKTTNPVATEQYGVVADNLQQTNTGPIVGNVNSQGALPGMVWQNRDVYLQGPIWAKIPHTDGNFHPSPLMGGFGLKHPPPQILIKNTPVPADPPTTFSQAKLASFITQYSTGQVSVEIEWELQKENSKRWNPEIQYTSNYYKSTNVDFAVNTEGTYSEPRPIGTRYLTRNL

SEQ ID NO: 4761 - protein, 720 aa, Adeno-associated virus
MSFVDHPPDWLEEVGEGLREFLGLEAGPPKPKPNQQHQDQARGLVLPGYNYLGPGNGLDRGEPVNRADEVAREHDISYNEQLEAGDNPYLKYNHADAEFQEKLADDTSFGGNLGKAVFQAKKRVLEPFGLVEEGAKTAPTGKRIDDHFPKRKKARTEEDSKPSTSSDAEAGPSGSQQLQIPAQPASSLGADTMSAGGGGPLGDNNQGADGVGNASGDWHCDSTWMGDRVVTKSTRTWVLPSYNNHQYREIKSGSVDGSNANAYFGYSTPWGYFDFNRFHSHWSPRDWQRLINNYWGFRPRSLRVKIFNIQVKEVTVQDSTTTIANNLTSTVQVFTDDDYQLPYVVGNGTEGCLPAFPPQVFTLPQYGYATLNRDNTENPTERSSFFCLEYFPSKMLRTGNNFEFTYNFEEVPFHSSFAPSQNLFKLANPLVDQYLYRFVSTNNTGGVQFNKNLAGRYANTYKNWFPGPMGRTQGWNLGSGVNRASVSAFATTNRMELEGASYQVPPQPNGMTNNLQGSNTYALENTMIFNSQPANPGTTATYLEGNMLITSESETQPVNRVAYNVGGQMATNNQSSTTAPATGTYNLQEIVPGSVWMERDVYLQGPIWAKIPETGAHFHPSPAMGGFGLKHPPPMMLIKNTPVPGNITSFSDVPVSSFITQYSTGQVTVEMEWELKKENSKRWNPEIQYTNNYNDPQFVDFAPDSTGEYRTTRPIGTRYL

SEQ ID NO: 4762 - protein, 736 aa, Adeno-associated virus
MAADGYLPDWLEDNLSEGIREWWDLKPGAPKPKANQQKQDDGRGLVLPGYKYLGPFNGLDKGEPVNAADAAALEHDKAYDQQLKAGDNPYLRYNHADAEFQERLQEDTSFGGNLGRAVFQAKKRVLEPFGLVEEGAKTAPGKKRPVEQSPQEPDSSSGIGKTGQQPAKKRLNFGQTGDSESVPDPQPLGEPPATPAAVGPTTMASGGGAPMADNNEGADGVGNASGNWHCDSTWLGDRVITTSTRTWALPTYNNHLYKQISSASTGASNDNHYFGYSTPWGYFDFNRFHCHFSPRDWQRLINNNWGFRPKRLNFKLFNIQVKEVTTNDGVTTIANNLTSTVQVFSDSEYQLPYVLGSAHQGCLPPFPADVFMIPQYGYLTLNNGSQAVGRSSFYCLEYFPSQMLRTGNNFTFSYTFEDVPFHSSYAHSQSLDRLMNPLIDQYLYYLNRTQNQSGSAQNKDLLFSRGSPAGMSVQPKNWLPGPCYRQQRVSKTKTDNNNSNFTWTGASKYNLNGRESIINPGTAMASHKDDKDKFFPMSGVMIFGKESAGASNTALDNVMITDEEEIKATNPVATERFGTVAVNLQSSSTDPATGDVHVMGALPGMVWQDRDVYLQGPIWAKIPHTDGHFHPSPLMGGFGLKHPPPQILIKNTPVPANPPAEFSATKFASFITQYSTGQVSVEIEWELQKENSKRWNPEVQYTSNYAKSANVDFTVDNNGLYTEPRPIGTRYLTRPL

SEQ ID NO: 4763 - protein, 736 aa, Adeno-associated virus
MAADGYLPDWLEDNLSEGIREWWDLKPGAPKPKANQQKQDDGRGLVLPGYKYLGPFNGLDKGEPVNAADAAALEHDKAYDQQLKAGDNPYLRYNHADAEFQERLQEDTSFGGNLGRAVFQAKKRVLEPFGLVEEGAKTAPGKKRPVEQSPQEPDSSSGIGKTGQQPAKKRLNFGQTGDSESVPDPQPLGEPPATPAAVGPTTMASGGGAPMADNNEGADGVGNASGNWHCDSTWLGDRVITTSTRTWALPTYNNHLYKQISSASTGASNDNHYFGYSTPWGYFDFNRFHCHFSPRDWQRLINNNWGFRPKRLNFKLFNIQVKEVTTNDGVTTIANNLTSTVQVFSDSEYQLPYVLGSAHQGCLPPFPADVFMIPQYGYLTLNNGSQAVGRSSFYCLEYFPSQMLRTGNNFTFSYTFEDVPFHSSYAHSQSLDRLMNPLIDQYLYYLNRTQNQSGSAQNKDLLFSRGSPAGMSVQPKNWLPGPCYRQQRVSKTKTDNNNSNFTWTGASKYNLNGRESIINPGTAMASHKDDEDKFFPMSGVMIFGKESAGASNTALDNVMITDEEEIKATNPVATERFGTVAVNLQSSSTDPATGDVHVMGALPGMVWQDRDVYLQGPIWAKIPHTDGHFHPSPLMGGFGLKHPPPQILIKNTPVPANPPAEFSATKFASFITQYSTGQVSVEIEWELQKENSKRWNPEVQYTSNYAKSANVDFTVDNNGLYTEPRPIGTRYLTRPL

SEQ ID NO: 4764 - protein, 736 aa, Adeno-associated virus
MAADGYLPDWLEDNLSEGIREWWDLKPGAPKPKANQQKQDDGRGLVLPGYKYLGPFNGLDKGEPVNAADAAALEHDKAYDQQLKAGDNPYLRYNHADAEFQERLQEDTSFGGNLGRAVFQAKKRVLEPLGLVEEGAKTAPGKKRPVEQSPQEPDSSSGIGKTGQQPAKKRLNFGQTGDSESVPDPQPLGEPPATPAAVGPTTMASGGGAPMADNNEGADGVGNASGNWHCDSTWLGDRVITTSTRTWALPTYNNHLYKQISSASTGASNDNHYFGYSTPWGYFDFNRFHCHFSPRDWQRLINNNWGFRPKRLNFKLFNIQVKEVTTNDGVTTIANNLTSTVQVFSDSEYQLPYVLGSAHQGCLPPFPADVFMIPQYGYLTLNNGSQAVGRSSFYCLEYFPSQMLRTGNNFTFSYTFEDVPFHSSYAHSQSLDRLMNPLIDQYLYYLNRTQNQSGSAQNKDLLFSRGSPAGMSVQPKNWLPGPCYRQQRVSKTKTDNNNSNFTWTGASKYNLNGRESIINPGTAMASHKDDEDKFFPMSGVMIFGKESAGASNTALDNVMITDEEEIKATNPVATERFGTVAVNLQSSSTDPATGDVHVMGALPGMVWQDRDVYLQGPIWAKIPHTDGHFHPSPLMGGFGLKHPPPQILIKNTPVPANPPAEFSATKFASFITQYSTGQVSVEIEWELQKENSKRWNPEVQYTSNYAKSANVDFTVDNNGLYTEPRPIGTRYLTRPL

SEQ ID NO: 4765 - protein, 736 aa, Adeno-associated virus
MAADGYLPDWLEDNLSEGIREWWDLKPGAPKPKANQQKQDDGRGLVLPGYKYLGPFNGLDKGEPVNAADAAALEHDKAYDQQLKAGDNPYLRYNHADAEFQERLQEDTSFGGNLGRAVFQAKKRVLEPLGLVEEGAKTAPGKKRPVEQSPQEPDSSSGIGKTGQQPAKKRLNFGQTGDSESVPDPQPLGEPPATPAAVGPTTMASGGGAPMADNNEGADGVGNASGNWHCDSTWLGDRVITTSTRTWALPTYNNHLYKQISSASTGASNDNHYFGYSTPWGYFDFNRFHCHFSPRDWQRLINNNWGFRPKRLNFKLFNIQVKEVTTNDGVTTIANNLTSTVQVFSDSEYQLPYVLGSAHQGCLPPFPADVFMIPQYGYLTLNNGSQAVGRSSFYCLEYFPSQMLRTGNNFTFSYTFEDVPFHSSYAHSQSLDRLMNPLIDQYLYYLNRTQNQSGSAQNKDLLFSRGSPAGMSVQPKNWLPGPCYRQQRVSKTKTDNNNSNFTWTGASKYNLNGRESIINPGTAMASHKDDKDKFFPMSGVMIFGKESAGASNTALDNVMITDEEEIKATNPVATERFGTVAVNLQSSSTDPATGDVHVMGALPGMVWQDRDVYLQGPIWAKIPHTDGHFHPSPLMGGFGLKHPPPQILIKNTPVPANPPAEFSATKFASFITQYSTGQVSVEIEWELQKENSKRWNPEVQYTSNYAKSANVDFTVDNNGLYTEPRPIGTRYLTRPL

SEQ ID NO: 4766 - protein, 728 aa, Adeno-associated virus
MAADGYLPDWLEGNLSEGIREWWDLKPGAPKPKANQQKQDDGRGLVLPGYRYLGPFNGLDKGEPVNEADAAALEHDKAYDKQLEQGDNPYLKYNHADAEFQERLQEDTSFGGNLGRAVFQAKKRVLEPLGLVEEGAKTAPGKKRPIESPDSSTGIGKNGQPPAKKKLNFGQTGDSESVPDPQPLGEPPAAPSGLGSGTMAAGGGAPMADNNEGADGVGNASGNWHCDSTWLGDRVITTSTRTWALPTYNNHLYKQISSQSGATNDNHFFGYSTPWGYFDFNRFHCHFSPRDWQRLINNNWGFRPRKLRFKLFNIQVKEVTTNDGVTTIANNLTSTIQVFSDSEYQLPYVLGSAHQGCLPPFPADVFMIPQYGYLTLNNGSQSVGRSSFYCLEYFPSQMLRTGDNFEFSYTFEEVPFHSSYAHSQSLDRLMNPLIDQYLYYLARTQSTTGSTRELQFHQAGPNTMAEQSKNWLPGPCYRQQRLSKNIDSNNNSNFAWTGATKYHLNGRNSLTNPGVAMATNKDDEDQFFPINGVLVFGKTGAANKTTLENVLMTSEEEIKTTNPVATEEYGVVSSNLQSSTAGPQTQTVNSQGALPGMVWQNRDVYLQGPIWAKIPHTDGNFHPSPLMGGFGLKHPPPQILIKNTPVPANPPEVFTPAKFASFITQYSTGQVSVEIEWELQKENSKRWNPEIQYTSNYAKSNNVEFAVNNEGVYTEPRPIGTRYLTRNL

SEQ ID NO: 4767 - DNA, 2211 bp, Adeno-associated virus
  source 1..2211: mol_type = genomic DNA
atggctgccgatggttatcttccagattggctcgaggacaaccttagtgaaggaattcgcgagtggtgggctttgaaacctggagcccctcaacccaaggcaaatcaacaacatcaagacaacgctcgaggtcttgtgcttccgggttacaaataccttggacccggcaacggactcgacaagggggagccggtcaacgcagcagacgcggcggccctcgagcacgacaaggcctacgaccagcagctcaaggccggagacaacccgtacctcaagtacaaccacgccgacgccgagttccaggagcggctcaaagaagatacgtcttttgggggcaacctcgggcgagcagtcttccaggccaaaaagaggcttcttgaacctcttggtctggttgaggaagcggctaagacggctcctggaaagaagaggcctgtagagcagtctcctcaggaaccggactcctccgcgggtattggcaaatcgggtgcacagcccgctaaaaagagactcaatttcggtcagactggcgacacagagtcagtcccagaccctcaaccaatcggagaacctcccgcagccccctcaggtgtgggatctcttacaatggcttcaggtggtggcgcaccagtggcagacaataacgaaggtgccgatggagtgggtagttcctcgggaaattggcattgcgattcccaatggctgggggacagagtcatcaccaccagcacccgaacctgggccctgcccacctacaacaatcacctctacaagcaaatctccaacagcacatctggaggatcttcaaatgacaacgcctacttcggctacagcaccccctgggggtattttgacttcaacagattccactgccacttctcaccacgtgactggcagcgactcatcaacaacaactggggattccggcctaagcgactcaacttcaagctcttcaacattcaggtcaaagaggttacggacaacaatggagtcaagaccatcgccaataaccttaccagcacggtccaggtcttcacggactcagactatcagctcccgtacgtgctcgggtcggctcacgagggctgcctcccgccgttcccagcggacgttttcatgattcctcagtacgggtatctgacgcttaatgatggaagccaggccgtgggtcgttcgtccttttactgcctggaatatttcccgtcgcaaatgctaagaacgggtaacaacttccagttcagctacgagtttgagaacgtacctttccatagcagctacgctcacagccaaagcctggaccgactaatgaatccactcatcgaccaatacttgtactatctctcaaagactattaacggttctggacagaatcaacaaacgctaaaattcagtgtggccggacccagcaacatggctgtccagggaagaaactacatacctggacccagctaccgacaacaacgtgtctcaaccactgtgactcaaaacaacaacagcgaatttgcttggcctggagcttcttcttgggctctcaatggacgtaatagcttgatgaatcctggacctgctatggccagccacaaagaaggagaggaccgtttctttcctttgtctggatctttaatttttggcaaacaaggaactggaagagacaacgtggatgcggacaaagtcatgataaccaacgaagaagaaattaaaactactaacccggtagcaacggagtcctatggacaagtggccacaaaccaccagagtgcccaagcacaggcgcagaccggctgggttcaaaaccaaggaatacttccgggtatggtttggcaggacagagatgtgtacctgcaaggacccatttgggccaaaattcctcacacggacggcaactttcacccttctccgctgatgggagggtttggaatgaagcacccgcctcctcagatcctcatcaaaaacacacctgtacctgcggatcctccaacggccttcaacaaggacaagctgaactctttcatcacccagtattctactggccaagtcagcgtggagatcgagtgggagctgcagaaggaaaacagcaagcgctggaacccggagatccagtacacttccaactattacaagtctaataatgttgaatttgctgttaatactgaaggtgtatatagtgaaccccgccccattggcaccagatacctgactcgtaatctgtaa

SEQ ID NO: 4768 - protein, 736 aa, Adeno-associated virus
MAADGYLPDWLEDNLSEGIREWWALKPGAPQPKANQQHQDNARGLVLPGYKYLGPGNGLDKGEPVNAADAAALEHDKAYDQQLKAGDNPYLKYNHADAEFQERLKEDTSFGGNLGRAVFQAKKRLLEPLGLVEEAAKTAPGKKRPVEQSPQEPDSSAGIGKSGAQPAKKRLNFGQTGDTESVPDPQPIGEPPAAPSGVGSLTMASGGGAPVADNNEGADGVGSSSGNWHCDSQWLGDRVITTSTRTWALPTYNNHLYKQISNSTSGGSSNDNAYFGYSTPWGYFDFNRFHCHFSPRDWQRLINNNWGFRPKRLNFKLFNIQVKEVTDNNGVKTIANNLTSTVQVFTDSDYQLPYVLGSAHEGCLPPFPADVFMIPQYGYLTLNDGSQAVGRSSFYCLEYFPSQMLRTGNNFQFSYEFENVPFHSSYAHSQSLDRLMNPLIDQYLYYLSKTINGSGQNQQTLKFSVAGPSNMAVQGRNYIPGPSYRQQRVSTTVTQNNNSEFAWPGASSWALNGRNSLMNPGPAMASHKEGEDRFFPLSGSLIFGKQGTGRDNVDADKVMITNEEEIKTTNPVATESYGQVATNHQSAQAQAQTGWVQNQGILPGMVWQDRDVYLQGPIWAKIPHTDGNFHPSPLMGGFGMKHPPPQILIKNTPVPADPPTAFNKDKLNSFITQYSTGQVSVEIEWELQKENSKRWNPEIQYTSNYYKSNNVEFAVNTEGVYSEPRPIGTRYLTRNL

SEQ ID NO: 4769 - DNA, 2460 bp, Adeno-associated virus
  source 1..2460: mol_type = genomic DNA
ggtaattcctccggaaattggcattgcgattccacatggctgggcgaccgagtcattaccaccagcacccggacttgggccctgcccacctacaacaaccacctctacaagcaaatctccagccaatcgggtgccaccaacgacaaccactacttcggctacagcaccccttgggggtattttgatttcaacagattccactgccatttctcaccacgtgactggcagcgactcatcaacaacaactggggattcatggctgccgatggttatcttccagattggctcgaggacactctctctgaaggaatcagacagtggtggaagctcaaacctggcccaccaccgccgaaacctaaccaacaacaccgggacgacagtaggggtcttgtgcttcctgggtacaagtacctcggacccttcaacggactcgacaaaggagagccggtcaacgaggcagacgccgcggccctcgagcacgacaaagcctacgaccaccagctcaagcaaggggacaacccgtacctcaaatacaaccacgcggacgctgaatttcaggagcgtcttcaagaagatacgtctttcgggggcaacctcgggcgagcagtcttccaggccaaaaagagggtactcgagcctcttggtctggttgaggaagctgttaagacggctcctggaaaaaagagacctatagagcagtctcctgcagaaccggactcttcctcgggcatcggcaaatcaggccagcagcccgctaagaaaagactcaattttggtcagactggcgacacagagtcagtcccagaccctcaaccaatcggagaaccccccgcagccccctctggtgtgggatctaatacaatggcttcaggcggtggggcaccaatggcagacaataacgaaggcgccgacggagtgggtaattcctcgggaaattggcattgcgattccacatggatgggcgacagagttatcaccaccagcacaagaacctgggccctccccacctacaataatcacctctacaagcaaatctccagcgaatcgggagccaccaacgacaaccactacttcggctacagcaccccctgggggtattttgactttaacagattccactgtcacttctcaccacgtgactggcagcgactcatcaacaacaactggggatttagacccaagaaactcaatttcaagctcttcaacatccaagtcaaggaggtcacgcagaatgatggaaccacgaccatcgccaataaccttaccagcacggtgcaggtcttcacagactctgagtaccagctgccctacgtcctcggttcggctcaccagggctgccttccgccgttcccagcagacgtcttcatgattcctcagtacggctacttgactctgaacaatggcagccaagcggtaggacgttcttcattctactgtctagagtattttccctctcagatgctgaggacgggaaacaacttcaccttcagctacacttttgaagacgtgcctttccacagcagctacgcgcacagccagagtctggatcggctgatgaatcctctcattgaccagtacctgtattacctgagcaaaactcagggtacaagtggaacaacgcagcaatcgagactgcagttcagccaagctgggcctagctccatggctcagcaggccaaaaactggctaccgggacccagctaccgacagcagcgaatgtctaagacggctaatgacaacaacaacagtgaatttgcttggactgcagccaccaaatattacctgaatggaagaaattctctggtcaatcccgggcccccaatggccagtcacaaggacgatgaggaaaagtatttccccatgcacggaaatctcatctttggaaaacaaggcacaggaactaccaatgtggacattgaatcagtgcttattacagacgaagaagaaatcagaacaactaatcctgtggctacagaacaatacggacaggttgccaccaaccatcagagtcagaacaccacagcttcctatggaagtgtggacagccagggaatcttacctggaatggtgtggcaggaccgcgatgtctatcttcaaggtcccatttgggccaaaactcctcacacggacggacactttcatccttctccgctcatgggaggctttggactgaaacaccctcctccccagatcctgatcaaaaacacacctgtgccagcgaatcccgcgaccactttcactcctggaaagtttgcttcgttcattacccagtattccaccggacaggtcagcgtggaaatagagtgggagctgcagaaagaaaacagcaaacgctggaacccagaaattcagtacacctccaactacaacaagtcggtgaatgtggagtttaccgtggacgcaaacggtgtttattctgaaccccgccctattggcactcgttaccttacccggaacttg

SEQ ID NO: 4770 - DNA, 3123 bp, Adeno-associated virus
  source 1..3123: mol_type = genomic DNA
gaattcgccctttctacggctgcgtcaactggaccaatgaaaactttcccttcaacgattgcgtcgacaagatggtgatctggtgggaggagggaaagatgaccgccaaggtcgtggaatctgccaaagccattctgggtggaggcaaggttcgtgtggaccagaaatgcaagtcttcggcccagatcgacccgactccggtgattgtcacctctaacaccaacatgtgcgccgtgattgacggaaactcgaccaccttcgagcaccagcagccgttgcaagaccggatgttcaaatttgaacttacccgccgtttggatcatgactttgggaaggtcaccaagcaggaagtcaaagactttttccggtgggctcaagatcacgtgactgaggtggagcatgagttctacgtcaaaaagggtggagccaagaaaaggcccgcccccgatgatgtatatataaatgagcccaagcgggcgcgcgagtcagttgcgcagccatcgacgtcagacgcggaagcttcgataaactacgcggacaggtaccaaaacaaatgttctcgtcacgtgggcatgaatctgatgctgtttccctgtcgacaatgcgaaagaatgaatcagaattcaaatatctgcttcacacacgggcaaaaagactgtttggaatgctttcccgtgtcagaatctcaacccgtttctgtcgtcagaaaaacgtatcagaaactttgttacattcatcatatcatgggaaaagtaccagacgcctgcactgcctgcgacctggtaaatgtggacttggatgactgtatttctgagcaataaatgacttaaatcaggtatggctgctgacggttatcttccagattggctcgaggacactctctctgaaggaatcagacagtggtggaagctcaaacctggcccaccaccgccgaaacctaaccaacaacaccgggacgacagtaggggtcttgtgcttcctgggtacaagtacctcggacccttcaacggactcgacaaaggagagccggtcaacgaggcagacgccgcggccctcgagcacgacaaagcctacgaccaccagctcaagcaaggggacaacccgtacctcaaatacaaccacgcggacgctgaatttcaggagcgtcttcaagaagatacgtctttcgggggcaacctcgggcgagcagtcttccaggccaaaaagagggtactcgagcctcttggtctggttgaggaagctgttaagacggctcctggaaaaaagagacctatagagcagtctcctgcagaaccggactcttcctcgggcatcggcaaatcaggccagcagcccgctaagaaaagactcaattttggtcagactggcgacacagagtcagtcccaggccctcaaccaatcggagaaccccccgcagccccctctggtgtgggatctaatacaatggcttcaggcggtggggcaccaatggcagacaataacgaaggcgccgacggagtgggtaattcctcgggaaattggcattgcgattccacatggatgggcgacagagttatcaccaccagcacaagaacctgggccctccccacctacaataatcacctctacaagcaaatctccagcgaatcgggagccaccaacgacaaccactacttcggctacagcaccccctgggggtattttgactttaacagattccactgtcacttctcaccacgtgactggcagcgactcatcaacaacaactggggatttagacccaagaaactcaatttcaagctcttcaacatccaagtcaaggaggtcacgcagaatgatggaaccacgaccatcgccaataaccttaccagcgcggtgcaggtcttcacagactctgagtaccagctgccctacgtcctcggttcggctcaccagggctgccttccgccgttcccagcagacgtcttcatgattcctcagtacggctacttgactctgaacaatggcagccaagcggtaggacgttcttcattctactgtctagagtattttccctctcagatgctgaggacgggaaacaacttcaccttcagctacacttttgaagacgtgcctttccacagcagctacgcgcacagccagagtctggatcggctgatgaatcctctcattgaccagtacctgtattacctgagcaaaactcagggtacaagtggaacaacgcagcaatcgagactgcagttcagccaagctgggcctagctccatggctcagcaggccaaaaactggctaccgggacccagctaccgacagcagcgaatgtctaagacggctaatgacaacaacaacagtgaatttgcttggactgcagccaccaaatattacctgaatggaagaaattctctggtcaatcccgggcccccagtggccagtcacaaggacgatgaggaaaagtatttccccatgcacggaaatctcatctttggaaaacaaggcacaggaactaccaatgtggacattgaatcagtgcttattacagacgaagaagaaatcagaacaactaatcctgtggctacagaacaatacggacaggttgccaccaaccatcagagtcagaacaccacagcttcctatggaagtgtggacagccagggaatcttacctggaatggtgtggcaggaccgcgatgtctatcttcaaggtcccatttgggccaaaactcctcacacggacggacactttcatccttctccgctcatgggaggctttggactgaaacaccctcctccccagatcctgatcaaaaacacacctgtgccagcgaatcccgcgaccactttcactcctggaaagtttgcttcgttcattacccagtattccacctgacaggtcagcgtggaaatagagtgggagctgcagaaagaaaacagcaaacgctggaacccagaaattcagtacacctccaactacaacaagtcggtgaatgtggagtttaccgtggacgcaaacggtgtttattctgaaccccgccctattggcactcgttaccttacccggaacttgtaatttcctgttaatgaataagccgatttatgcgtttcagttgaactttggtctctgcgaagggcgaattcgtttaaacct

SEQ ID NO: 4771 - protein, 735 aa, Adeno-associated virus
MAADGYLPDWLEDTLSEGIRQWWKLKPGPPPPKPNQQHRDDSRGLVLPGYKYLGPFNGLDKGEPVNEADAAALEHDKAYDHQLKQGDNPYLKYNHADAEFQERLQEDTSFGGNLGRAVFQAKKRVLEPLGLVEEAVKTAPGKKRPIEQSPAEPDSSSGIGKSGQQPAKKRLNFGQTGDTESVPGPQPIGEPPAAPSGVGSNTMASGGGAPMADNNEGADGVGNSSGNWHCDSTWMGDRVITTSTRTWALPTYNNHLYKQISSESGATNDNHYFGYSTPWGYFDFNRFHCHFSPRDWQRLINNNWGFRPKKLNFKLFNIQVKEVTQNDGTTTIANNLTSAVQVFTDSEYQLPYVLGSAHQGCLPPFPADVFMIPQYGYLTLNNGSQAVGRSSFYCLEYFPSQMLRTGNNFTFSYTFEDVPFHSSYAHSQSLDRLMNPLIDQYLYYLSKTQGTSGTTQQSRLQFSQAGPSSMAQQAKNWLPGPSYRQQRMSKTANDNNNSEFAWTAATKYYLNGRNSLVNPGPPVASHKDDEEKYFPMHGNLIFGKQGTGTTNVDIESVLITDEEEIRTTNPVATEQYGQVATNHQSQNTTASYGSVDSQGILPGMVWQDRDVYLQGPIWAKTPHTDGHFHPSPLMGGFGLKHPPPQILIKNTPVPANPATTFTPGKFASFITQYSTGQVSVEIEWELQKENSKRWNPEIQYTSNYNKSVNVEFTVDANGVYSEPRPIGTRYLTRNL

SEQ ID NO: 4772 - DNA, 3123 bp, Adeno-associated virus
  source 1..3123: mol_type = genomic DNA
gaattcgccctttctacggctgcgtcaactggaccaatgaaaactttcccttcaacgattgcgtcgacaagatggtgatctggtgggaggagggaaagatgaccgccaaggtcgtggaatctgccaaagccattctgggtggaagcaaggttcgtgtggaccagaaatgcaagtcttcggcccagatcgacccgactccggtgattgtcacctctaacaccaacatgtgcgccgtgattgacggaaactcgaccaccttcgagcaccagcagccgttgcaagaccggatgttcaaatttgaacttacccgccgtttggatcatgactttgggaaggtcaccaagcaggaagtcaaagactttttccggtgggctcaagatcacgtgactgaggtggagcatgagttctacgtcaaaaagggtggagccaagaaaaggcccgcccccgatgatgtatatataaatgagcccaagcgggcgcgcgagtcagttgcgcagccatcgacgtcagacgcggaagcttcgataaactacgcgggcaggtaccaaaacaaatgttctcgtcacgtgggcatgaatctgatgctgtttccctgtcgacaatgcgaaagaatgaatcagaattcaaatatctgcttcacacacgggcaaaaagactgtttggaatgctttcccgtgtcagaatctcaacccgtttctgtcgtcagaaaaacgtatcagaaactttgttacattcatcatatcatgggaaaagaaccagacgcctgcactgcctgcgacctggtaaatgtggacttggatgactgtatttctgagcaataaatgacttaaatcaggtatggctgctgacggttatcttccagattggctcgaggacactctctctgaaggaatcagacagtggtggaagctcaaacctggcccaccaccgccgaaacctaaccaacaacaccgggacgacagtaggggtcttgtgcttcctgggtacaagtacctcggacccttcaacggactcgacaaaggagagccggtcaacgaggcagacgccgcggccctcgagcacgacaaagcctacgaccaccagctcaagcaaggggacaacccgtacctcaaatacaaccacgcggacgctgaatttcaggagcgtcttcaagaagatacgtctttcgggggcaacctcgggcgagcagtcttccaggccaaaaagagggtactcgagcctcttggtctggttgaggaagctgttaagacggctcctggaaaaaagagacctatagagcagtctcctgcagaaccggactcttcctcgggcatcggcgaatcaggccagcagcccgctaagaaaagactcaattttggtcagactggcgacacagagtcagtcccagaccctcaaccaatcggagaaccccccgcagccccctctggtgtgggatctaatacaatggcttcaggcggtggggcaccaatggcagacgataacgaaggcgccgacggagtgggtaattcctcgggaaattggcattgcgattccacatggatgggcgacagagttatcaccaccagcacaagaacctgggccctccccacctacaataatcacctctacaagcaaatctccagcgaatcgggagccaccaacgacaaccactacttcggctacagcaccccctgggggtattttgactttaacagattccactgtcacttctcaccacgtgactggcagcgactcatcaacaacaactggggatttagacccaagaaactcaatttcaagctcttcaacatccaagtcaaggaggtcacgcagaatgatggaaccacgaccatcgccaataaccttaccagcacggtgcaggtcttcacagactctgagtaccagctgccctacgtcctcggttcggctcaccagggctgccttccgccgttcccagcagacgtcttcatgattcctcagtacggctacttgactctgaacaatggcagccaagcggtaggacgttcttcattctactgtctagagtattttccctctcagatgctgaggacgggaaacaacttcaccttcagctacacttttgaagacgtgcctttccacagcagctacgcgcacagccagagtctggatcggctgatgaatcctctcattgaccagtacctgtattacctgagcaaaactcagggtacaagtggaacaacgcagcaatcgagactgcagttcagccaagctgggcctagctccatggctcagcaggccaaaaactggctaccgggacccagctaccgacagcagcgaatgtctaagacggctaatgacaacaacaacagtgaatttgcttggactgcagccaccaaatattacctgaatggaagaaattctctggtcaatcccgggcccccaatggccagtcacaaggacgatgaggaaaagtatttccccatgcacggaaatctcatctttggaaaacaaggcacaggaactaccaatgtggacattgaatcagtgcttattacagacgaagaagaaatcagaacaactaatcctgtggctacagaacaatacggacaggttgccaccaaccatcagagtcaggacaccacagcttcctatggaagtgtggacagccagggaatcttacctggaatggtgtggcaggaccgcgatgtctatcttcaaggtcccatttgggccaaaactcctcacacggacggacactttcatccttctccgctcatgggaggctttggactgaaacaccctcctccccagatcctgatcaaaaacacacctgtgccagcgaatcccgcgaccactttcactcctggaaagtttgcttcgttcattacccagtattccaccggacaggtcagcgtggaaatagagtgggagctgcagaaagaaaacagcaaacgctggaacccagaaattcagtacacctccaactacaacaagtcggtgaatgtggagtttaccgtggacgcaaacggtgtttattctgaaccccgccctattggcactcgttaccttacccggaacttgtaatttcctgttaatgaataaaccgatttatgcgtttcagttgaactttggtctctgcgaagggcgaattcgcggccgcta

SEQ ID NO: 4773 - protein, 735 aa, Adeno-associated virus
MAADGYLPDWLEDTLSEGIRQWWKLKPGPPPPKPNQQHRDDSRGLVLPGYKYLGPFNGLDKGEPVNEADAAALEHDKAYDHQLKQGDNPYLKYNHADAEFQERLQEDTSFGGNLGRAVFQAKKRVLEPLGLVEEAVKTAPGKKRPIEQSPAEPDSSSGIGESGQQPAKKRLNFGQTGDTESVPDPQPIGEPPAAPSGVGSNTMASGGGAPMADDNEGADGVGNSSGNWHCDSTWMGDRVITTSTRTWALPTYNNHLYKQISSESGATNDNHYFGYSTPWGYFDFNRFHCHFSPRDWQRLINNNWGFRPKKLNFKLFNIQVKEVTQNDGTTTIANNLTSTVQVFTDSEYQLPYVLGSAHQGCLPPFPADVFMIPQYGYLTLNNGSQAVGRSSFYCLEYFPSQMLRTGNNFTFSYTFEDVPFHSSYAHSQSLDRLMNPLIDQYLYYLSKTQGTSGTTQQSRLQFSQAGPSSMAQQAKNWLPGPSYRQQRMSKTANDNNNSEFAWTAATKYYLNGRNSLVNPGPPMASHKDDEEKYFPMHGNLIFGKQGTGTTNVDIESVLITDEEEIRTTNPVATEQYGQVATNHQSQDTTASYGSVDSQGILPGMVWQDRDVYLQGPIWAKTPHTDGHFHPSPLMGGFGLKHPPPQILIKNTPVPANPATTFTPGKFASFITQYSTGQVSVEIEWELQKENSKRWNPEIQYTSNYNKSVNVEFTVDANGVYSEPRPIGTRYLTRNL

SEQ ID NO: 4774 - DNA, 3113 bp, Adeno-associated virus
  source 1..3113: mol_type = genomic DNA
gaattcgccctttctacggctgcgtcaactggaccaatgaaaactttcccttcaacgattgcgtcgacaagatggtgatctggtgggaggagggaaagatgaccgccaaggtcgtggaatctgccaaagccattctgggtggaagcaaggttcgtgtggaccagaaatgcaagtcttcggcccagatcgacccgactccggtgattgtcacctctaacaccaacatgtgcgccgtgattgacggaaactcgaccaccttcgagcaccagcagccgttgcaagaccggatgttcaaatttgaacttacccgccgtttggatcatgactttgggaaggtcaccaagcaggaagtcaaagactttttccggtgggctcaagatcacgtgactgaggtggagcatgagttctacgtcaaaaagggtggagccaagaaaaggcccgcccccgatgatgtatatataaatgagcccaagcgggcgcgcgagtcagttgcgcagccatcgacgtcagacgcggaagcttcgataaactacgcggacaggtaccaaaacaaatgttctcgtcacgtgggcatgaatctgatgctgtttccctgtcgacaatgcgaaagaatgaatcagaattcaaatatctgcttcacacacgggcaaaaagactgtttggaatgctttcccgtgtcagaatctcaacccgttcctgtcgtcagaaaaacgtatcagaaactttgttacattcatcatatcatgggaaaagtaccagacgcctgcactgcctgcgacctggtaaatgtggacttggatgactgtatttctgagcaataaatgacttaaatcaggtatggctgctgacggttatcttccagattggctcgaggacactctctctgaaggaatcagacagtggtggaagctcaaacctggcccaccaccgccgaaacctaaccaacaacaccgggacgacagtaggggtcttgtgcttcctgggtacaagtacctcggacccttcaacggactcgacaaaggagagccggtcaacgaggcagacgccgcggccctcgagcacgacaaagcctacgaccaccagctcaagcaaggggacaacccgtacctcaaatacaaccacgcggacgctgaatttcaggagcgtcttcaagaagatacgtctttcgggggcaacctcgggcgagcagtcttccaggccaaaaagagggtactcgagcctcttggtctggttgaggaagctgttaagacggctcctggaaaaaagagacctatagagcagtctcctgcagaaccggactcttcctcgggcatcggcaaatcaggccagcagcccgctaagaaaagactcaattttggtcagactggcgacacagagtcagtcccagaccctcaaccaatcggagaaccccccgcagccccctctggtgtgggatctaatacaatggcttcaggcggtggggcaccaatggcagacaataacgaaggcgccgacggagtgggtaattcctcgggaaattggcattgcgattccacatggatgggcgacagagttatcaccaccagcacaagaacctgggccctccccacctacaataatcacctctacaagcaaatctccagcgaatcgggagccaccaacgacaaccactacttcggctacagcaccccctgggggtattttgactttaacagattccactgtcacttctcaccacgtgactggcagcgactcatcaataacaactggggatttagacccaagaaactcaatttcaagctcttcaacatccaagtcaaggaggtcacgcagaatgatggaaccacgaccatcgccaataaccttaccagcacggtgcaggtcttcacagactctgagtaccagctgccctacgtcctcggttcggctcaccagggctgccttccgccgttcccagcagacgtcttcatgattcctcagtacggctacttgactctgaacaatggcagccaagcggtaggacgttcttcattctactgtctagagtattttccctctcagatgctgaggacgggaaacaacttcaccttcagctacacttttgaagacgtgcctttccacagcagctacgcgcacagccagagtctggatcggctgatgaatcctctcattgaccagtacctgtattacctgagcaaaactcagggtacaagtggaacaacgcagcaatcgagactgcagttcaaccaagctgggcctagctccatggctcagcaggccaaaaactggctaccgggacccagctaccgacagcagcgaatgtctaagacggctaatgacaacaacaacagtgaatttgcttggactgcagccaccaaatattacccgaatggaagaaattctctggtcaatcccgggcccccaatggccagtcacaaggacgatgaggaaaagtatttccccatgcacggaaatctcatctttggaaaacaaggcacaggaactaccaatgtggacattgaatcagtgcttattacagacgaagaagaaatcagaacgactaatcctgtggctacagaacaatacggacaggttgccaccaaccgtcagagtcagaacaccacagcttcctatggaagtgtggacagccagggaatcttacctggaatggtgtggcaggaccgcgatgtctatcttcaaggtcccatttgggccaaaactcctcacacggacggacactttcatccttctccgctcatgggaggctttggactgaaacaccctcctccccagatcctgatcaaaaacacacctgtgccagcgaatcccgcgaccactttcactcctggaaagtttgcttcgttcattacccagtattccaccggacaggtcagcgtggaaatagagtgggagctgcagaaagaaaacagcaaacgctggaacccggaaattcagtacacctccaactacaacaagtcggtgaatgtggagtttaccgtggacgcaaacggtgtttattctgaaccccgccctattggcactcgttaccttacccggaacttgtaatttcctgttaatgaataaaccgatttatgcgtttcagttgaactttggtctctgcgaagggcgaattc

SEQ ID NO: 4775 - protein, 735 aa, Adeno-associated virus
MAADGYLPDWLEDTLSEGIRQWWKLKPGPPPPKPNQQHRDDSRGLVLPGYKYLGPFNGLDKGEPVNEADAAALEHDKAYDHQLKQGDNPYLKYNHADAEFQERLQEDTSFGGNLGRAVFQAKKRVLEPLGLVEEAVKTAPGKKRPIEQSPAEPDSSSGIGKSGQQPAKKRLNFGQTGDTESVPDPQPIGEPPAAPSGVGSNTMASGGGAPMADNNEGADGVGNSSGNWHCDSTWMGDRVITTSTRTWALPTYNNHLYKQISSESGATNDNHYFGYSTPWGYFDFNRFHCHFSPRDWQRLINNNWGFRPKKLNFKLFNIQVKEVTQNDGTTTIANNLTSTVQVFTDSEYQLPYVLGSAHQGCLPPFPADVFMIPQYGYLTLNNGSQAVGRSSFYCLEYFPSQMLRTGNNFTFSYTFEDVPFHSSYAHSQSLDRLMNPLIDQYLYYLSKTQGTSGTTQQSRLQFNQAGPSSMAQQAKNWLPGPSYRQQRMSKTANDNNNSEFAWTAATKYYPNGRNSLVNPGPPMASHKDDEEKYFPMHGNLIFGKQGTGTTNVDIESVLITDEEEIRTTNPVATEQYGQVATNRQSQNTTASYGSVDSQGILPGMVWQDRDVYLQGPIWAKTPHTDGHFHPSPLMGGFGLKHPPPQILIKNTPVPANPATTFTPGKFASFITQYSTGQVSVEIEWELQKENSKRWNPEIQYTSNYNKSVNVEFTVDANGVYSEPRPIGTRYLTRNL

SEQ ID NO: 4776 - DNA, 3122 bp, Adeno-associated virus
  source 1..3122: mol_type = genomic DNA
agcggccgcgaattcgccctttctacggctgcgtcaactggaccaatgaaaactttcccttcaacgattgcgtcgacaagatggtgatctggtgggaggagggaaagatgaccgccaaggtcgtggaatctgccaaagccattctgggtggaagcaaggttcgtgtggaccagaaatgcaggtcttcggcccagatcgacccgactccggtgattgtcacctctaacaccaacatgtgcgccgtgattgacggaaactcgaccaccttcgagcaccagcagccgttgcaagaccggatgttcaaatttgaacttacccgccgtttggatcatgactttgggaaggtcaccaagcaggaagtcaaagactttttccggtgggctcaagatcacgtgactgaggtggagcatgagttctacgtcaaaaagggtggagccaagaaaaggcccgcccccgatgatgtatatataaatgagcccaagcgggcgcgcgagtcagttgcgcagccatcgacgtcagacgcggaagcttcgataaactacgcggacaggtaccaaaacaaatgttctcgtcacgtgggcatgaatctgatgctgtttccctgtcgacaatgcgaaagaatgaatcagaattcaaatatctgcttcacacacgggcaaaaagactgtttggaatgctttcccgtgtcagaatctcaacccgtttctgtcgtcagaaaaacgtatcagaaactttgttacattcatcatatcatgggaaaagtaccagacgcctgcactgcctgcgacctggtaaatgtggacttggatgactgtatttctgagcaataaatgacttaaatcaggtatggctgctgacggttatcttccagattggctcgaggacactctctctgaaggaatcagacagtggtggaagctcaaacctggcccaccaccgccgaaacctaaccaacaacaccgggacgacagtaggggtcttgtgcttcctgggtacaagtacctcggacccttcaacggactcgacaaaggagagccggtcaacgaggcagacgccgcggccctcgagcacgacaaagcctacgaccaccagctcaagcaaggggacaacccgtacctcaaatacaaccacgcggacgctgaatttcaggagcgtcttcaagaagatacgtctttcgggggcaacctcgggcgagcagtcttccaggccaaaaagagggtactcgagcctcttggtctggttgaggaagctgttaagacggctcctggaaaaaagagacctatagagcagtctcctgcagaaccggactcttcctcgggcatcggcaaatcaggccagcagcccgctaagaaaagactcaattttggtcagactggcgacacagagtcagtcccagaccctcaaccaatcggagaaccccccgcagccccctctggtgtgggatctaatacaatggcttcaggcggtggggcaccaatggcagacaataacgaaggcgccgacggagtgggtaattcctcgggaaattggcattgcgattccacatggatgggcgacagagttatcaccaccagcacaagaacctgggccctccccacctacaataatcgcctctacaagcaaatctccagcgaatcgggagccaccaacgacaaccactacttcggctacagcaccccctgggggtattttgactttaacagattccactgtcacttctcaccacgtgactggcagcgactcatcaacaacaactggggatttagacccaagaaactcaatttcaagctcttcaacatccaagtcaaggaggtcacgcagaatgatggaaccacgaccatcgccaataaccttaccagcacggtgcaggtcttcacagactctgagtaccagctgccctacgtcctcggttcggctcaccagggctgccttccgccgttcccagcagacgtcttcatgattcctcagtacggctacttgactctgaacaatggcagccaagcggtaggacgttcttcattctactgtctagagtattttccctctcagatgctgaggacgggaaacaacttcaccttcagctacacttttgaagacgtgcctttccacagcagctacgcgcacagccagagtctggatcggctgatgaatcctctcattgaccagtacctgtattacctgagcaaaactcagggtacaagtggaacaacgcagcaatcgagactgcagttcagccaagctgggcctagctccatggctcagcaggccaaaaactggctaccgggacccagctaccgacagcagcgaatgtctaagacggctaatgacaacaacaacagtgaatttgcttggactgcagccaccaaatattacctgaatggaagaaattctctggtcaatcccgggcccccaatggccagtcacaaggacgatgaggaaaagtatttccccatgcacggaaatctcatctttggaaaacaaggcacaggaactaccaatgtggacattgaatcagtgcttattacagacgaagaagaaatcagaacaactaatcctgtggctacagaacaatacggacaggttgccaccaaccatcagagtcagaacaccacagcttcctatggaagtgtggacagccagggaatcttacctggaatggtgtggcaggaccgcgatgtctatcttcaaggtcccatttgggccaaaactcctcacacggacggacactttcatccttctccgctcatgggaggctttggactgaaacaccctcctccccagatcctgatcaaaaacacacctgtgccagcgaatcccgcgaccactttcactcctggaaagtttgcttcgttcattacccagtattccaccggacaggtcagcgtggaaatagagtgggagctgcagaaagaaaacagcaaacgctggaacccagaaattcagtacacctccaactacaacaagtcggtgaatgtggagtttaccgtggacgcaaacggtgtttattctgaaccccgccctattggcactcgttaccttacccggaacttgtaatttcctgttaatgaataaaccgatttatgcgtttcagttgaactttggtctctgcgaagggcgaattc

SEQ ID NO: 4777 - protein, 735 aa, Adeno-associated virus
MAADGYLPDWLEDTLSEGIRQWWKLKPGPPPPKPNQQHRDDSRGLVLPGYKYLGPFNGLDKGEPVNEADAAALEHDKAYDHQLKQGDNPYLKYNHADAEFQERLQEDTSFGGNLGRAVFQAKKRVLEPLGLVEEAVKTAPGKKRPIEQSPAEPDSSSGIGKSGQQPAKKRLNFGQTGDTESVPDPQPIGEPPAAPSGVGSNTMASGGGAPMADNNEGADGVGNSSGNWHCDSTWMGDRVITTSTRTWALPTYNNRLYKQISSESGATNDNHYFGYSTPWGYFDFNRFHCHFSPRDWQRLINNNWGFRPKKLNFKLFNIQVKEVTQNDGTTTIANNLTSTVQVFTDSEYQLPYVLGSAHQGCLPPFPADVFMIPQYGYLTLNNGSQAVGRSSFYCLEYFPSQMLRTGNNFTFSYTFEDVPFHSSYAHSQSLDRLMNPLIDQYLYYLSKTQGTSGTTQQSRLQFSQAGPSSMAQQAKNWLPGPSYRQQRMSKTANDNNNSEFAWTAATKYYLNGRNSLVNPGPPMASHKDDEEKYFPMHGNLIFGKQGTGTTNVDIESVLITDEEEIRTTNPVATEQYGQVATNHQSQNTTASYGSVDSQGILPGMVWQDRDVYLQGPIWAKTPHTDGHFHPSPLMGGFGLKHPPPQILIKNTPVPANPATTFTPGKFASFITQYSTGQVSVEIEWELQKENSKRWNPEIQYTSNYNKSVNVEFTVDANGVYSEPRPIGTRYLTRNL

SEQ ID NO: 4778 - protein, 733 aa, Adeno-associated virus
MAADGYLPDWLEDNLSEGIREWWDLKPGAPKPKANQQKQDDGRGLVLPGYKYLGPFNGLDKGEPVNAADAAALEHDKAYDQQLKAGDNPYLRYNHADAEFQERLQEDTSFGGNLGRAVFQAKKRVLEPLGLVEEGAKTAPGKKRPLESPQEPDSSSGIGKKGKQPAKKRLNFEEDTGAGDGPPEGSDTSAMSSDIEMRAAPGGNAVDAGQGSDGVGNASGDWHCDSTWSEGKVTTTSTRTWVLPTYNNHLYLRLGTTSNSNTYNGFSTPWGYFDFNRFHCHFSPRDWQRLINNNWGLRPKAMRVKIFNIQVKEVTTSNGETTVANNLTSTVQIFADSSYELPYVMDAGQEGSLSPFPNDVFMVPQYGYCGIVTGENQNQTDRNAFYCLEYFPSQMLRTGNNFEMAYNFGKVPFHSMYAYSQSPDRLMNPLLDQYLWHLQSTTSGETLNQGNAATTFGKIRSGDFAFYRKNWLPGPCVKQQRLSKTASQNYKIPASGGNALLKYDTHYTLNNRWSNIAPGPPMATAGPSDGDFSNAQLIFPGPSVTGNTTTSANNLLFTSEEEIAATNPRDTDMFGQIADNNQNATTAPITGNVTAMGVLPGMVWQNRDIYYQGPIWAKIPHADGHFHPSPLIGGFGLKHPPPQIFIKNTPVPANPATTFTAARVDSFITQYSTGQVAVQIEWEIEKERSKRWNPEVQFTSNYGNQSSMLWAPDTTGKYTEPRVIGSRYLTNHL

SEQ ID NO: 4779 - protein, 733 aa, Adeno-associated virus
MAADGYLPDWLEDNLSEGIREWWDLKPGAPKLKANQQKQDDGRGLVLPGYKYLGPFHGLDKGEPVNAADAAALEHDKAYDQQLKAGDNPYLRYNHADAEFQERLQEDTSFGGNLGRAVFQAKKRVLEPLGLVEEGAKTAPGKKRPLESPQEPDSSSGIGKKGKQPAKKRLNFEEDTGAGDGPPEGSDTSAMSSDIEMRAAPGGNAVDAGQGSDGVGNASGDWHCDSTWSEGKVTTTSTRTWVLPTYNNHLYLRLGTTSNSNTYNGFSTPWGYFDFNRFHCHFSPRDWQRLINNNWGLRPKAMRVKIFNIQVKEVTTSNGETTVANNLTSTVQIFADSSYELPYVMDAGQEGSLPPFPNDVFMVPQYGYCGIVTGENQNQTDRNAFYCLEYFPSQMLRTGNNFEMAYNFEKVPFHSMYAHSQSLDRLMNPLLDQYLWHLQSTTSGETLNQGNAATTFGKIRSGDFAFYRKNWLPGPCVKQQRFSKTASQNYKIPASGGNALLKYDTHYTLNNRWSNIAPGPPMATAGPSDGDFSNAQLIFPGPSVTGNTTTSANNLLFTSEGEIAATNPRDTDMFGQIADNNQNATTAPITGNVTAMGVLPGMVWQNRDIYYQGPIWAKIPHADGHFHPSPLIGGFGLKHPPPQIFIKNTPVPANPATTFTAARVDSFITQYSTGQVAVQIEWEIEKERSKRRNPEVQFTSNYGNQSSMLWAPDTTGKYTEPRVIGSRYLTNHL

SEQ ID NO: 4780 - protein, 733 aa, Adeno-associated virus
MAADGYLPDWLEDNLSEGIREWWDLKPGAPKPKANQQKQDDGRGLVLPGYEYLGPFNGLDKGEPVNAADAAALEHDKAYDQQLKAGDNPYLRYNHADAEFQERLQEDTSFGGNLGRAVFQAKKRVLEPLGLVEEGAKTAPGKKRPLESPQEPDSSSGIGKKGKQPAKKRLNFEEDTGAGDGPPEGSDTSAMSSDIEMRAAPGGNAVDAGQGSDGVGNASGDWHCDSTWSEGKVTTTSTRTWVLPTYNNHLYLRLGTTSNSNTYNGFSTPWGYFDFNRFHCHFSPRDWQRLINNNWGLRPKAMRVKIFNIQVKEVTTSNGETTVANNLTSTVQIFADSSYELPYVMDAGQEGSLPPFPNDVFMVPQYGYCGIVTGENQNQTDRNAFYCLEYFPSQMLRTGNNFETAYNFEKVPFHSMYAHSQSLDGLMNPLLDQYLWHLQSTTSGETLNQGNAATTFGKIRSGDFAFYRKNWLPGPCVKQQRFSKTASQNYKIPASGGNALLKYDTHYTLNNRWSNIAPGPPMATAGPSDGDFSNAQLIFPGPSVTGNTTTSANNLLFTSEEEIAATNPRDTDMFGQIADNNQNATTAPITGNVTAMGVLPGMVWQNRDIYYQGPIWAKIPHADGHFHPSPLIGGFGLKHPPPQIFIKNTPVPAYPATTFTAARVDSFITQYSTGQVAVQIEWEIEKERSKRWNPEVQFTSNCGNQSSMLWAPDTTGKYTEPRVIGSRYLTNHL

SEQ ID NO: 4781 - protein, 735 aa, Adeno-associated virus
MAADGYLPDWLEDTLSEGIRQWWKLKPGPPPPKPNQQHRDDSRGLVLPGYKYLGPFNGLDKGEPVNEADAAALEHDKAYDHQLKQGDNPYLKYNHADAEFQERLQEDTSFGGNLGRAVFQAKKRVLEPLGLVEEAVKTAPGKKRPIEQSPAEPDSSSGIGKSGQQPAKKRLNFGQTGDTESVPDPQPIGEPPAAPSGVGSNTMASGGGAPMADNNEGADGVGNSSGNWHCDSTWMGDRVITTSTRTWALPTYNNHLYKQISSESGATNDNHYFGYSTPWGYFDFNRFHCHFSPRDWQRLINNNWGFRPKKLNFKLFNIQVKEVTQNDGTTTIANNLTSTVQVFTDSEYQLPYVLGSAHQGCLPPFPADVFMIPQYGYLTLNNGSQAVGRSSFYCLEYFPSQMLRTGNNFTFSYTFEDVPFHSSYAHSQSLDRLMNPLIDQYLYYLSKTQGTSGTTQQSRLQFSQAGPSSMAQQAKNWLPGPSYRQQRMSKTANDNNNSEFAWTAATKYYLNGRNSLVNPGPPMASHKDDEEKYFPMHGNLIFGKQGTGTTNVDIESVLITDEEEIRTTNPVATEQYGQVATNHQSQNTTASYGSVDSQGILPGMVWQDRDVYLQGPIWAKIPHTDGHFHPSPLMGGFGLKHPPPQILIKNTPVPANPATTFTPGKFASFITQYSTGQVSVEIEWELQKENSKRWNPEIQYTSNYNKSVNVEFTVDANGVYSEPRPIGTRYLTRNL

SEQ ID NO: 4782 - DNA, 3127 bp, Adeno-associated virus
  source 1..3127: mol_type = genomic DNA
gcggccgcgaattcgcccttcgcagagaccaaagttcaactgaaacgaatcaaccggtttattgattaacatgcaattacagattacgggtgaggtaacgagtgccaatagggcgaggctcagagtaaacaccctggctgtcaacggcaaagtccacaccagtctgcttttcaaagttggaggtgtactgaatctccgggtcccagcgcttgctgttttccttctgcagctcccactcgatttccacgctgacttgtccggtgctgtactgtgtgatgaacgaagcaaacttggcaggagtaaacacctccggaggattagcgggaacgggagtgttcttgatcaggatctgaggaggcggatgtttaagtccaaagccgcccatcaaaggagacgggtgaaagttgccatccgtgtgaggaatcttggcccagatgggaccctgcaggtacacgtcccggttctgccagaccatgccaggtaaggctccctggttgttgacaacttgtgtctgggctgcagtattagccgcttgtaagttgctgctgactatcccgtattcttccgtggctacaggattagtaggacgaatttcttcttcatttgtcattaacacattttccaatgtagttttgttagttgctccagtttttccaaaaatcaggactccgctggatgggaaaaagcggtcctcgtcgtccttgtgagttgccatggcgacgccgggattaaccaacgagtttctgccgttcaggtgatatttggtggcaccagtccaagcaaagttgctgttgttgttttgatccagcgttttggagaccctttgttgccggaagcagggtccaggtaaccaattcttggcttgttcggccatagttgaaggcccgccctggtaaaactgcagttcccgattgccagctgtgcctcctgggtcactctgtgttctggccaggtagtacaagtactggtcgatgaggggattcatcagccggtccaggctctggctgtgtgcgtagctgctgtggaaaggcacgtcctcgaagctgtagctgaactcaaagttgttgcccgttctcagcatctgagaggggaagtactccaggcagtagaaggaggaacgtcccacagactgactgccattgttgagagtcaggtagccgtactgaggaatcatgaagacgtccgccgggaacggaggcaggcagccctggtgcgcagagccgaggacgtacggcagctggtattccgagtccgagaatacctgaatcgtgctggtaaggttattagcgatggtcgtaacgccgtcattcgtcgtgacctccttgacctggatgttgaagagcttgaaccgcagcttcttgggccggaatccccagttgttgttgatgagtcgctgccagtcacgtggtgagaagtggcagtggaatctgttaaagtcaaaatacccccagggggtgctgtagccgaagtaggtgttgtcgttggtactacctgcagtttcactggagatttgctcgtagaggtggttgttgtaggtgggcagggcccaggttcgggtgctggtggtaatgactctgtcgcccagccatgtggaatcgcaatgccaatttcctgaggcattacccactccgtcggcaccttcgttattgtctgccattggtgcgccaccgcctgcagccactgtaccagatcccacactagagggcgctgctggaggttctccgagaggttgagggtcggggactgactctgagtcgccagtctgaccgaaattgagtctctttctggcgggctgctggcccttcttgccgatgcccgtggaggagtcgggggaacgctgaggtgacggctctaccggtctcttctttgcaggagccgtcttagcgccttcctcaaccagaccgagaggttcgagaacccgcttcttggcctggaagactgctcgcccgaggttgcccccaaatgacgtatcttcttgcagacgctcctgaaactcggcgtcggcgtggttataccgcaggtacgggttgtcacccgcattgagctgctggtcgtaggccttgtcgtgctcgagggccgctgcgtccgccgcgttgacgggctcccccttgtcgagtccgttgaagggtccgaggtacttgtagccaggaagcaccagaccccggccgttgtcctgcttttgctggttggctttgggtttcggggctccaggtttcaggtcccaccactcgcgaatgccctcagagaggttgtcctcgagccaatctggaagataaccatcggcagccatacctgatttaaatcatttattgttcaaagatgcagtcatccaaatccacattgaccagatcgcaggcagtgcaagcgtctggcacctttcccatgatatgatgaatgtagcacagtttctgatacgcctttttgacgacagaaacgggtttagattctgacacgggaaagcactctaaacagtctttctgtccgtgagtgaagcagatatttgaattctgattcattctctcgcattgtctgcagggaaacagcatcagattcatgcccacgtgacgagaacatttgttttggtacctgtctgcgtagttgatcgaagcttccgcgtctgacgtcgatggctgcgcaactgactcgcgcacccgtttgggctcacttatatctgcgtcactgggggcgggtcttttcttggctccaccctttttgacgtagaattcatgctccacctcaaccacgtaatcctttgcccaccggaaaaagtctttgacttcctgcttggtgaccttcccaaagtcatgatccagacggcgggtgagttcaaatttgaacatccggtcttgcaacggctgctggtgttcgaaggtcgttgagttcccgtcgatcacggcgcacatgttggtgttggagatgacgatcgcgggagtcgggtctatctgggccgaggacttgcatttctggtccacgcgcaccttgcttcctccgagaatggctttggccgactccacgaccttggcggtcatcttcccctcctcccaccagatcaccatcttgtcgacacagtcgttgaagggaaagttctcattggtccagttgacgcagccgtagaaagggcgaattc

SEQ ID NO: 4783 - DNA, 3106 bp, Adeno-associated virus
  source 1..3106: mol_type = genomic DNA
gcggccgcgaattcgcccttcgcagagaccaaagttcaactgaaacgaatcaaccggtttattgattaacaagtaattacaggttacgggtgaggtaacgggtgccaatggggcgaggctcagtataaaccccttcgttgttgacagcaaattccacattattagacttggcataatttgaggtgtactgaatctctggattccagcgtttgctgttttctttctgcagttcccactcgatctccacgctgacctggccggtgctgtactgcgtgataaatgaggcaaacttggcaggagtaaacacctctggaggattagcaggtaccggggtgtttttgatgagaatttgaggaggcgggtgtttgagtccaaatccgcccatcaggggagacgggtgaaagttgccgtccgtgtgaggaattttggcccagatgggaccctgcaggcacacgtcccggttctgccagaccatgccgggcagagccccctggctgttgacagtctgtgtctggggtccggccgtagacgattgcaggttgctggagaccacaccgtattcttctgtagccacgggattggtggttttgatctcctcctcgctggtcattagcacgttttccagcgttgtcttgttggcagcccccgttttgccaaaaaccagcactccgttgatgggaaagaactggtcctcgtcgtccttgttggtggccatggctacgcccgggttggttaatgaatttctaccattcagatggtatttagtggccccggtccaggcaaagttactgttgttgttgctgtctatgttttttgacagtctctgctgccgataacagggtccgggcagccagttctttgattgctcggccatggtgttgggcccagcctgatggaactgcagctcccttgtggaccccgtagtgctctgggtccgggccaggtagtacaggtactggtcgatgaggggattcatcagccggtctaggctctggctgtgcacatagctgctgtggaaaggcacttcctcaaaggtgtagctgaattcaaagttattgcccgttctcagcatctgagaaggaaagtactccaggcagtagaaggaggaacgtcccacagactgactgccgttgtttagagtcagatatccgtactgaggaatcatgaacacgtccgcagggaacggagggaggcagccctggtgcgcagagccgaggacgtacggcagttggtactccgagtccgagaagacctgaatcgtgctggtaaggttattagcgatggtcgtaacgccgtcgttcgtcgtgacctccttgacctggatgttgaacaacttgaaccgcagctttctgggccggaatccccagttgttgttgatgagtcgctgccagtcacgtggtgagaagtggcagtggaatctgttgaagtcaaaatagccccagggggtgctgtagctgaagaagtggttgtcgttggtagccccgctctgacttgatatctgcttgtagaggtggttgttgtaggtgggcagggcccaggtgcgggtgctggtggtgatgactctgtcgcccagccatgtggaatcgcaatgccaatttccggaggcattacccactccgtcggcgccttcgttattgtctgccattggtgcgccaccgcctgcagccattgtaccagatcccagacctgagggcgcggcgggaggttctccgagaggttgggggtcgggcactgactctgagtcgccagtctgcccaaagttgagcttctttttagcgggctgctggcctttcttgccgatgcccgtggaggagtcgggggattctatgggtctcttctttccaggagccgtcttagcgacttcctcaaccagaccgagaggttcgagaacccgcttcttggcctggaagactgctcgcccgaggttgcccccaaaagacgtatcttcttgaagacgctcctgaaactcggcgtcggcgtggttgtacttgaggtacgggttgtccccctgctcgagctgcttgtcgtaggccttgtcgtgctcgagggccgcggcgtctgcctcgttgaccggctctcccttgtcgagtccgttgaagggtctgaggtacttgtagccaggaagcaccagaccccggccgtcgtcctgcttttgctggttggctttgggtttcggggctccaggtttcaagtcccaccactcgcgaatgccctcagagaggttgtcctcgagccaatctggaagataaccatcggcagccatacctggtttaagtcatttattgctcagaaacacagtcatccaggtccacgttgaccagatcgcaggccgagcaagcaatctcgggagcccgccccagcagatgatgaatggcacagagtttccgatacgtcctctttctgacgaccggttgagattctgacacgccggggaaacattctgaacagtctctggtcccgtgcgtgaagcaaatgttgaaattctgattcactctctcgcatgtcttgcagggaaacagcatctgaagcatgcccgcgtgacgagaacatttgttttggtacctgtcggcaaagtccaccggagctccttccgcgtctgacgtcgatggattcgcgactgaggggcaggcccgcttgggctcgcttttatccgcgtcatcgggggcgggtctcttgttggccccaccctttctgacgtagaacccatgcgccacctcggtcacgtgatcctgcgcccagcggaagaaccttttgacttcctgctttgtcaccttgccaaagttatgctccagacggcgggtgggttcaaatttgaacatccggtcctgcaacggctgctggtgctcgaaggtggcgctgttcccgtcaatcacggcgcacatgttggtgttggaggtgacggtcacgggggtggggtcgatctgggcggacgacttgcacttttggtccacgcgcaccttgctgccgccgagaatggccttggcggactccacgaccttggccgtcatcttgccctcctcccaccagatcaccatcttgtcggcgcaatcgttgaagggaaagttctcattggtccagttgacgcagccgtagaaagggcgaattc

SEQ ID NO: 4784 - DNA, 3102 bp, Adeno-associated virus
  source 1..3102: mol_type = genomic DNA
gcggccgcgaattcgcccttcgcagagaccaaagttcaactgaaacgaatcaaccggtttattgattaacaagtaattacaggttacgggtgaggtaacgggtgccaatggggcgaggctcagtataaaccccttcgttgttgacagcaaattccacattattagacttggcataatttgaggtgtactgaatctctggattccagcgtttgctgttttctttctgcagttcccactcgatctccacgctgacctggccggtgctgtactgcgtgataaatgaggcaaacttggcaggagtaaacacctctggaggattagcaggtaccggggtgtttttgatgagaatttgaggaggcgggtgtttgagtccaaatccgcccatcaggggagacgggtgaaagttgccgtccgtgtgaggaatttcggcccagatgggaccctgcaggtacacgtcccggttctgccagaccatgccgggcagagccccctggctgttgacagtctgtgtccggggtccggccgtagacgattgcaggttgctggagaccacaccgtattcttctgtagccacgggattggtggttttgatctcctcctcgctggtcattagcacgttttccagcgttgtcttgttggcagcccccgttttgccaaaaaccagcactccgttgatgggaaggaactggtcctcgtcgtccttgttggtggccatggctacgcccgggttggttaatgaatttctaccattcagatggtatttagtggccccggtccaggcaaagttactgttgttgttgctgtctatgttttttgacagtctctgctgccgataacagggtccgggcagccagttctttgattgctcggccacggtgttgggcccagcctgatggaactgcagctcccttgtggaccccgtagtgctctgggtccgggccaggtagtacaggtactggtcgatgaggggattcatcagccggtccaggctctggctgtgcgcatagctgctgtggaaaggcacttcctcaaaggtgtagctgaattcaaagttattgcccgttctcagcatctgagaaggaaagtactccaggcagcagaaggaggaacgtcccacagactgactgccgttgtttagagtcagatatccgtactgaggaatcatgaacacgtccgcagggaacggagggaggcagccctggtgcgcagagccgaggacgtacggcagttggtactccgagtccgagaagacctgaatcgtgctggtaaggttattagcgatggtcgtaacgccgtcgttcgtcgtgacctccttgacctggatgttgaacaacttgaaccgcagctttctgggccggaatccccagttgttgttgatgagtcgctgccagtcacgtggtgagaagtggcagtggaatctgttgaagtcaaaatagccccagggggtgctgtagccgaagaagtggttgtcgttggtagccccgctctgacttgatatctgcttgtagaggtggttgttgtaggtgggcagggcccaggtgcgggtgctggtggtgatgactctgtcgcccagccatgtggaatcgcaatgccaatttccggaggcattacccactccgtcggcgccttcgttattgtctgccattggtgcgccaccgcctgcagccattgtaccagatcccagacctgagggcgcggcgggaggttctccgagaggttgggggtcgggcactgactctgagtcgccagtctgcccaaagttgagcttctttttagcgggctgctggcctttcttgccgatgcccgtggaggagtcgggggattctatgggtctcttctttccggaagccgtcttagcgccttcctcaaccagaccgagaggttcgagaacccgcttcttggcctggaagactgctcgcccgaggttgcccccaaaagacgtatcttcttgaagacgctcctgaaactcggcgtcggcgtggttgtacttgaggtacgggttgtccccctgctcgagctgcttgtcgtaggccttgtcgtgctcgagggccgcggcgtctgcctcgttgaccggctctcccttgtcgagtccgttgaagggtccgaggtacttgtagccaggaagcaccagaccccggccgtcgtcctgcttttgctggttggctttgggtttcggggctccaggtttcaagtcccaccactcgcgaatgccctcagagaggttgtcctcgagccaatctggaagataaccatcggcagccatacctggtttaagtcatttattgctcagaaacacagtcatccaggtccacgttgaccagatcgcaggccgagcaagcaatctcgggagcccgccccagcagatgatgaatggcacagagtttccgatacgtcctctttctgacgaccggttgagattctgacacgccggggaaacattctgaacagtctctggtcccgtgcgtgaagcaaatgttgaaattctgattcattctctcgcatgtcttgcagggaaacagcatctgaagcatgcccgcgtgacgagaacatttgttttggtacctgtcggcaaagtccaccggagctccttccgcgtctgacgtcgatggatccgcgactgaggggcaagcccgcttgggctcgcttttatccgcgtcatcgggggcgggtctcttgttggctccaccctttctgacgtagaactcatgcgccacctcggtcacgtgatcctgcgcccagcggaagaactctttgacttcctgctttgtcaccttgccaaagtcatgctccagacggcgggtgagttcaaatttgaacatccggtcttgtaacggctgctggtgctcgaaggtggtgctgttcccgtcaatcacggcgcacatgttggtgttggaagtgacgatcacgggggtgggatcgatctgggcggacgacttgcacttttggtccacgcgcaccttgctgccgccgagaatggccttggcggactccacgaccttggccgtcatcttgccctcctcccaccagatcaccatcttgtcgacgcaatcgttgaagggaaagttctcattggtccagttgacgcagccgaagggcgaattc

SEQ ID NO: 4785 - protein, 728 aa, Adeno-associated virus
MAADGYLPDWLEDNLSEGIREWWDLKPGAPKPKANQQKQDDGRGLVLPGYRYLGPFNGLDKGEPVNEADAAALEHDKAYDKQLEQGDNPYLKYNHADAEFQERLQEDTSFGGNLGRAVFQAKKRVLEPLGLVEEGAKTAPGKKRPIESPDSSTGIGKNGQPPAKKKLNFGQTGDSESVPDPQPLGEPPAAPSGLGSGTMAAGGGAPMADNNEGADGVGNASGNWHCDSTWLGDRVITTSTRTWALPTYNNHLYKQISSQSGATNDNHFFGYSTPWGYFDFNRFHCHFSPRDWQRLINNNWGFRPRKLRFKLFNIQVKEVTTNDGVTTIANNLTSTIQVFSDSEYQLPYVLGSAHQGCLPPFPADVFMIPQYGYLTLNNGSQSVGRSSFYCLEYFPSQMLRTGNNFEFSYTFEEVPFHSSYAHSQSLDRLMNPLIDQYLYYLARTQSTTGSTRELQFHQAGPNTMAEQSKNWLPGPCYRQQRLSKNIDSNNNSNFAWTGATKYHLNGRNSLTNPGVAMATNKDDEDQFFPINGVLVFGKTGAANKTTLENVLMTSEEEIKTTNPVATEEYGVVSSNLQSSTAGPQTQTVNSQGALPGMVWQNRDVYLQGPIWAKIPHTDGNFHPSPLMGGFGLKHPPPQILIKNTPVPANPPEVFTPAKFASFITQYSTGQVSVEIEWELQKENSKRWNPEIQYTSNYAKSNNVEFAVNNEGVYTEPRPIGTRYLTRNL

SEQ ID NO: 4786 - DNA, 2187 bp, Adeno-associated virus
  source 1..2187: mol_type = genomic DNA
atggctgccgatggttatcttccagattggctcgagggcaacctctctgagggcattcgcgagtggtgggacttgaaacctggagccccgaaacccaaagccaaccagcaaaagcaggacgacggccggggtctggtgcttcctggctacaggtacctcggacccttcaacggactcgacaagggagagccggtcaacgaggcagacgccgcggccctcgagcacgacaaggcctacgacaagcagctcgagcagggggacaacccgtacctcaagtacaaccacgccgacgccgagtttcaggagcgtcttcaagaagatacgtcttttgggggcaacctcgggcgagcagtcttccaggccaagaagcgggttctcgaacctctcggtctggttgaggaaggcgctaagacggctcctggaaagaagagacccatagaatcccccgactcctccacgggcatcggcaagaacggccagccgcccgctaaaaagaagctcaactttgggcagactggcgactcagagtcagtgcccgacccccaacctctcggagaacctcccgccgcgccctcaggtctgggatctggtacaatggctgcaggcggtggcgcaccaatggcagacaataacgaaggcgccgacggagtgggtaatgcctccggaaattggcattgcgattccacatggctgggcgacagagtcatcaccaccagcacccgcacctgggccctgcccacctacaacaaccacctctacaagcagatatcaagtcagagcggggctaccaacgacaaccacttcttcggctacagcaccccctggggctattttgacttcaacagattccactgccacttctcaccacgtgactggcagcgactcatcaacaacaactggggattccggcccagaaagctgcggttcaagttgttcaacatccaggtcaaggaggtcacgacgaacgacggcgttacgaccatcgctaataaccttaccagcacgattcaggtcttctcggactcggagtaccaactgccgtacgtcctcggctctgcgcaccagggctgcctccctccgttccctgcggacgtgttcatgattcctcagtacggatatctgactctaaacaacggcagtcagtctgtgggacgttcctccttctactgcctggagtactttccttctcagatgctgagaacgggcgataactttgaattcagctacacctttgaggaagtgcctttccacagcagctatgcgcacagccagagcctggaccggctgatgaatcccctcatcgaccagtacctgtactacctggcccggacccagagcactacggggtccacaagggagctgcagttccatcaggctgggcccaacaccatggccgagcaatcaaagaactggctgcccggaccctgttatcggcagcagagactgtcaaaaaacatagacagcaacaacaacagtaactttgcctggaccggggccactaaataccatctgaatggtagaaattcattaaccaacccgggcgtagccatggccaccaacaaggacgacgaggaccagttctttcccatcaacggagtgctggtttttggcaaaacgggggctgccaacaagacaacgctggaaaacgtgctaatgaccagcgaggaggagatcaaaaccaccaatcccgtggctacagaagaatacggtgtggtctccagcaacctgcaatcgtctacggccggaccccagacacagactgtcaacagccagggggctctgcccggcatggtctggcagaaccgggacgtgtacctgcagggtcccatctgggccaaaattcctcacacggacggcaactttcacccgtctcccctgatgggcggatttggactcaaacacccgcctcctcaaattctcatcaaaaacaccccggtacctgctaatcctccagaggtgtttactcctgccaagtttgcctcatttatcacgcagtacagcaccggccaggtcagcgtggagatcgagtgggaactgcagaaagaaaacagcaaacgctggaatccagagattcagtacacctcaaattatgccaagtctaataatgtggaatttgctgtcaacaacgaaggggtttatactgagcctcgccccattggcacccgttacctcacccgtaacctgtaa

SEQ ID NO: 4787 - protein, 728 aa, Adeno-associated virus; identical to SEQ ID NO: 4766

SEQ ID NO: 4788 - DNA, 3106 bp, Adeno-associated virus
  source 1..3106: mol_type = genomic DNA
gcggccgcgaattcgcccttcgcagagaccaaagttcaactgaaacgaatcagccggtttattgattaacaagtaattacaggttacgggtgaggtaacgggtgccaatggggcgaggctcagtataaaccccttcgttgttgacagcaaattccacattattagacttggcataatttgaggtgtactgaatctctggattccagcgtttgctgttttctttctgcagttcccactcgatctccacgctgacctggccggtgctgtactgcgtgataaatgaggcaaacttggcaggagtaaacacctctggaggattagcaggtaccggggtgtttttgatgagaatttgaggaggcgggtgtttgagtccaaatccgcccatcaggggagacgggtgaaagttgccgtccgtgtgaggaattttggcccagatgggaccctgcaggtacacgtcccggttctgccagaccatgccgggcagagccccctggctgttgacagtctgtgtctggggtccggccgtagacgattgcaggttgctggagaccacaccgtattcttctgtagccacgggattggtggttttgatctcctcctcgctggtcattagcacgttttccagcgttgtcttgttggcagcccccgttttgccaaaaaccagcactccgttgatgggaaagaactggtcctcgtcgtccttgttggtggccatggctacgcccgggttggttaatgaatttctaccattcagatggtatttagtggccccggtccaggcaaagttactgttgttgttgctgtctatgttttttgacagtctctgctgccgataacagggtccgggcagccagttctttgattgctcggccatggtgttgggcccagcctgatggaactgcagctcccttgtggaccccgtagtgctctgggtccgggccaggtagtacaggtactggtcgatgaggggattcatcagccggtccaggctctggctgtgcgcatagctgctgtggaaaggcacttcctcaaaggtgtagctgaattcaaagttatcgcccgttctcagcatctgagaaggaaagtactccaggcagtagaaggaggaacgtcccacagactgactgccgttgtttagagtcagatatccgtactgaggaatcatgaacacgtccgcagggaacggagggaggcagccctggtgcgcagagccgaggacgtacggcagttggtactccgagtccgagaagacctgaatcgtgctggtaaggttattagcgatggtcgtaacgccgtcgttcgtcgtgacctccttgacctggatgttgaacaacttgaaccgcagctttctgggccggaatccccagttgttgttgatgagtcgctgccagtcacgtggtgagaagtggcagtggaatctgttgaagtcaaaatagccccagggggtgctgtagccgaagaagtggttgtcgttggtagccccgctctgacttgatatctgcttgtagaggtggttgttgtaggtgggcagggcccaggtgcgggtgctggtggtgatgactctgtcgcccagccatgtggaatcgcaatgccaatttccggaggcattacccactccgtcggcgccttcgttattgtctgccattggtgcgccaccgcctgcagccattgtaccagatcccagacctgagggcgcggcgggaggttctccgagaggttgggggtcgggcactgactctgagtcgccagtctgcccaaagttgagcttctttttagcgggcggctggccgttcttgccgatgcccgtggaggagtcgggggattctatgggtctcttctttccaggagccgtcttagcgccttcctcaaccagaccgagaggttcgagaacccgcttcttggcctggaagactgctcgcccgaggttgcccccaaaagacgtatcttcttgaagacgctcctgaaactcggcgtcggcgtggttgtacttgaggtacgggttgtccccctgctcgagctgcttgtcgtaggccttgtcgtgctcgagggccgcggcgtctgcctcgttgaccggctctcccttgtcgagtccgttgaagggtccgaggtacctgtagccaggaagcaccagaccccggccgtcgtcctgcttttgctggttggctttgggtttcggggctccaggtttcaagtcccaccactcgcgaatgccctcagagaggttgccctcgagccaatctggaagataaccatcggcagccatacctggtttaagtcatttattgctcagaaacacagtcatccaggtccacgttggccagatcgcaggccgagcaagcaatctcgggagcccgccccagcagatgatgaatggcacagagtttccgatacgtcctctttctgacgaccggttgagattctgacacgccggggaaacattctgaacagtctctggtcccgtgcgtgaagcaaatgttgaaattctgattcattctctcgcatgtcttgcaggggaacagcatctgaagcatgcccgcgtgacgagaacatttgttttggtacctgtcggcaaagtccaccggagctccttccgcgtctgacgtcgatggatccgcgactgaggggcaggcccgcttgggctcgcttttatccgcgtcatcgggggcgggtctcttgttggctccaccctttctgacgtagaactcatacgccacctcggtcacgtgatcctgcgcccagcggaagaactctttgacttcctgctttgtcaccttgccaaagtcatgctccagacggcgggtgagttcaaatttgaacatccggtcttgtaacggctgctggtgctcgaaggtggtgctgttcccgtcaatcacggcgcacatgttggtgttggaagtgacgatcacgggggtgggatcgatctgggcggacgacttgcacttttggtccacgcgcaccttgctgccgccgagaatggccttggcggactccacgaccttggccgtcatcctgccctcctcccaccagatcaccatcttgtcgacgcaatcgttgaagggaaagttctcattggtccagttgacgcagccgtagaaagggcgaattc

SEQ ID NO: 4789 - protein, 728 aa, Adeno-associated virus
MAADGYLPDWLEDNLSEGIREWWDLKPGAPKPKANQQKQDDGRGLVLPGYRYLGPFNGLDKGEPVNEADAAALEHDKAYDKQLEQGDNPYLKYNHADAEFQERLQEDTSFGGNLGRAVFQAKKRVLEPLGLVEEGAKTAPGKKRPIESPDSSTGIGKNGQPPAKKKLNFGQTGDSESVPDPQPLGEPPAAPSGLGSGTMAAGGGAPMADNNEGADGVGNASGNWHCDSTWLGDRVITTSTRTWALPTYNNHLYKQISSQSGATNDNHFFGYSTPWGYFDFNRFHCHFSPRDWQRLINNNWGFRPRKLRFKLFNIQVKEVTTNDGVTTIANNLTSTIQVFSDSEYQLPYVLGSAHQGCLPPFPADVFMIPQYGYLTLNNGSQSVGRSSFYCLEYFPSQMLRTGDNFEFSYTFEEVPFHSSYAHSQSLDRLMNPLIDQYLYYLARTQSTTGSTRELQFHQAGPNTMAEQSKNWLPGPCYRQQRLSKNIDSNNNSNFAWTGATKYHLNGRNSLTNPGVAMATNKDDEDQFFPINGVLVFGKTGAANKTTLENVLMTSEEEIKTTNPVATEEYGVVSSNLQSSTAGPQTQTVNSQGALPGMVWQNRDVYLQGPIWAKIPHTDGNFHPSPLMGGFGLKHPPPQILIKNTPVPANPPEVFTPAKFASFITQYSTGQVSVEIEWELQKENSKRWNPEIQYTSNYAKSNNVEFAVNNEGVYTEPRPIGTRYLTRNL

SEQ ID NO: 4790 - protein, 728 aa, Adeno-associated virus; identical to SEQ ID NO: 4785

SEQ ID NO: 4791 - protein, 728 aa, Adeno-associated virus
MAADGYLPDWLEDNLSEGIREWWDLKPGAPKPKANQQKQDDGRGLVLPGYKYLGPFNGLDKGEPVNEADAAALEHDKAYDKQLEQGDNPYLKYNHADAEFQERLQEDTSFGGNLGRAVFQAKKRVLEPLGLVEEGAKTAPGKKRPIESPDSSTGIGKNGQPPAKKKLNFGQTGDSESVPDPQPLGEPPAAPSGLGSGTMAAGGGAPMADNNEGADGVGNASGNWHCDSTWLGDRVITTSTRTWALPTYNNHLYKQISSQSGATNDNHFFGYSTPWGYFDFNRFHCHFSPRDWQRLINNNWGFRPRKLRFKLFNIQVKEVTTNDGVTTIANNLTSTIQVFSDSEYQLPYVLGSAHQGCLPPFPADVFMIPQYGYLTLNNGSQSVGRSSFYCLEYFPSQMLRTGNNFEFSYTFEEVPFHSSYAHSQSLDRLMNPLIDQYLYYLARTQSTTGSTRELQFHQAGPNTMAEQSKNWLPGPCYRQQRLSKNIDSNNNSNFAWTGATKYHLNGRNSLTNPGVAMATNKDDEDQFFPINGVLVFGKTGAANKTTLENVLMTSEEEIKTTNPVATEEYGVVSSNLQSSTAGPQTQTVNSQGALPGMVWQNRDVYLQGPIWAKIPHTDGNFHPSPLMGGFGLKHPPPQILIKNTPVPANPPEVFTPAKFASFITQYSTGQVSVEIEWELQKENSKRWNPEIQYTSNYAKSNNVEFAVNNEGVYTEPRPIGTRYLTRNL

SEQ ID NO: 4792 - protein, 728 aa, Adeno-associated virus
MAADGYLPDWLEDNLSEGIREWWDLKPGAPKPKANQQKQDDGRGLVLPGYKYLGPFNGLDKGEPVNEADAAALEHDKAYDKQLEQGDNPYLKYNHADAEFQERLQEDTSFGGNLGRAVFQAKKRVLEPLGLVEEGAKTAPGKKRPIESPDSSTGIGKKGQQPAKKKLNFGQTGDSESVPDPQPLGEPPAAPSGLGSGTMAAGGGAPMADNNEGADGVGNASGNWHCDSTWLGDRVITTSTRTWALPTYNNHLYKQISSQSGATNDNHFFGYSTPWGYFDFNRFHCHFSPRDWQRLINNNWGFRPRKLRFKLFNIQVKEVTTNDGVTTIANNLTSTIQVFSDSEYQLPYVLGSAHQGCLPPFPADVFMIPQYGYLTLNNGSQSVGRSSFYCLEYFPSQMLRTGNNFEFSYTFEEVPFHSSYAHSQSLDRLMNPLIDQYLYYLARTQSTTGSTRELQFHQAGPNTMAEQSKNWLPGPCYRQQRLSKNIDSNNNSNFAWTGATKYHLNGRNSLTNPGVAMATNKDDEDQFFPINGVLVFGKTGAANKTTLENVLMTSEEEIKTTNPVATEEYGVVSSNLQSSTAGPQTQTVNSQGALPGMVWQNRDVYLQGPIWAKIPHTDGNFHPSPLMGGFGLKHPPPQILIKNTPVPANPPEVFTPAKFASFITQYSTGQVSVEIEWELQKENSKRWNPEIQYTSNYAKSNNVEFAVNNEGVYTEPRPIGTRYLTRNL

SEQ ID NO: 4793 - DNA, 3098 bp, Adeno-associated virus
  source 1..3098: mol_type = genomic DNA
gaattcgcccttcgcagagaccaaagttcaactgaaacgaatcaaccggtttattgattaacaagtaattacaggttacgggtgaggtaacgggtgccaatggggcgaggctcagtataaaccccttcgttgttgacagcaaattccacattattagacttggcataatttgaggtgtactgaatctctggattccagcgtttgctgttttctttctgcagttcccactcgatctccacgctgacctggccggtgctgtactgcgtgataaatgaggcaaactaggcaggagtaaacacccctggaggattagcaggtaccggggtgtttttgatgagaatttgaggaggcgggtgtttgagtccaaatccgcccatcaggggagacgggtgaaagttgccgtccgtgtgaggaattttggcccagatgggaccctgcaggtacacgtcccggttctgccagaccatgccgggcagagccccctggctgttgacagtctgtgtctggggtccggccgtagacgattgcaggttgctggagaccacaccgtattcttctgtagccacgggattggtggttttgatctcctcctcgctggtcattagcacgttttccagcgttgtcttgttggcagcccccgttttgccaaaaaccagcactccgttgatgggaaagaactggccctcgtcgtccttgttggtggccatggctacgcccgggttggttaatgaatttctaccattcagatggtatttagtggccccggtccaggcaaagttactgttgttgttgctgtctatgttttttgacagtctctgctgccgataacagggtccgggcagccagttctttgattgctcggccatggtgttgggcccagcctgatggaactgcagctcccttgtggaccccgtagtgctctgggtccgggccaggtagtacaggtactggtcgatgaggggattcatcagccggtccaggctctggctgtgcgcatagctgctgtggaaaggcacttcctcaaaggtgtagctgaattcaaagttattgcccgttctcagcatctgagaaggaaagtactccaggcagtagaaggaggaacgtcccatagactgactgccgttgtttagagtcagatatccgtactgaggaatcatgaacacgtccgcagggaacggagggaggcagccctggtgcgcagagccgaggacgtacggcagttggtactccgagtccgagaagacctgaatcgtgctggtaaggttattagcgatggtcgtaacgccgtcgttcgtcgtgacctccttgacctggatgttgaacaacttgaaccgcagctttctgggccggaatccccagttgttgttgatgagtcgctgccagtcacgtggtgagaagtggcagtggaatctgttgaagtcaaaatagccccagggggtgctgtagccgaagaagtggttgtcgttggtagccccgctctgacttgatatctgcttgtagaggtggttgttgtaggtgggcagggcccaggtgcgggtgctggtggtgatgactctgtcgcccagccatgtggaatcgcaatgccaatttccggaggcattacccactccgtcggcgccttcgttattgtctgccattggtgcgccaccgcctgcagccattgtaccagatcccagacctgagggcgcggcgggaggttctccgagaggttgggggtcgggcactgactctgagtcgccagtctgcccaaagttgagcttctttttagcgggctgctggcctttcttgccgatgcccgtggaggagtcgggggattctatgggtctcttctttccaggagccgtcttagcgccttcctcaaccagaccgagaggttcgagaacccgcttcttggcctggaagactgctcgcccgaggttgcccccaaaagacgtatcttcttgaagacgctcctgaaactcagcgtcggcgtggttgtacttgaggtacgggttgtccccctgctcgagctgcttgtcgtaggccttgtcgtgctcgagggccgcggcgtctgcctcgttgaccggctctcccttgtcgagtccgttgaagggtccgaggtacttgtagccaggaagcaccagaccccggccgtcgtcctgcttttgctggttggctttgggtttcggggctccaggtttcaagtcccaccactcgcgaatgccctcagagaggttgtcctcgagccaatctggaagataaccatcggcagccatacctggtttaagtcatttattgctcagaaacacagtcatccaggtccacgttgaccagatcgcaggccgagcaagcaatctcgggagcccgccccagcagatgatgaatggcacagagtttccgatacgtcctctttctgacgaccggttgagattctgacacgccggggaaacattctgaacagtctctggtcccgtgcgtgaagcaaatgttgaaattctgattcattctctcgcatgtcttgcagggaaacagcatctgaagcatgcccgcgtgacgagaacatttgttttggtacctgtcggcaaagtccaccggagctccttccgcgtctgacgtcgatggatccgcgactgaggggcaggcccgcttgggctcgcttttatccgcgtcatcgggggcgggcctcttgttggctccaccctttctgacgtagaactcatgcgccacctcggtcacgtgatcctgcgcccagcggaagaactctttgacttcctgctttgtcaccttgccaaagtcctgctccagacggcgggtgagttcaaatttgaacatccggtcttgtaacggctgctggtgctcgaaggtggtgctgttcccgtcaatcacggcgcacatgttggtgttggaagtgacgatcacgggggtgggatcgatctgggcggacgacttgcacttttggtccacgcgcaccttgctgccgccgagaatggccttggcggactccacgaccttggccgtcatcttgccctcctcccaccagatcaccatcttgtcgacgcaatcgttgaagggaaagttctcattggtccagttgacgcagccgtagaaagggcgaattc

SEQ ID NO: 4794 - protein, 729 aa, Adeno-associated virus
MAADGYLPDWLEDNLSEGIREWWDLKPGAPKPKANQQKQDDGRGLVLPGYKYLGPFNGLDKGEPVNAADAAALEHDKAYDQQLKAGDNPYLRYNHADAEFQERLQEDTSFGGNLGRAVFQAKKRVLEPLGLVEEGAKTAPGKKRPIDSPDSSTGIGKKGQQPAKKKLNFGQTGDSESVPDPQPLGEPPAAPSSVGSGTMAAGGGAPMADNNEGADGVGNASGNWHCDSTWLGDRVITTSTRTWALPTYNNHLYKQISSSSSGATNDNHYFGYSTPWGYFDFNRFHCHFSPRDWQRLINNNWGFRPKKLRFKLFNIQVKEVTTNDGVTTIANNLTSTVQVFSDSEYQLPYVLGSAHQGCLPPFPADVFMIPQYGYLTLNNGSQSVGRSSFYCLEYFPSQMLRTGNNFEFSYSFEDVPFHSSYAHSQSLDRLMNPLIDQYLYYLARTQSTTGSTRELQFHQAGPNTMAEQSKNWLPGPCYRQQGLSKNLDFNNNSNFAWTAATKYHLNGRNSLTNPGIPMATNKDDEDQFFPINGVLVFGKTGAANKTTLENVLMTSEEEIKTTNPVATEEYGVVSSNLQPSTAGPQSQTINSQGALPGMVWQNRDVYLQGPIWAKIPHTDGNFHPSPLMGGFGLKHPPPQILIKNTPVPANPPEVFTPAKFASFITQYSTGQVSVEIEWELQKENSKRWNPEIQYTSNYAKSNNVEFAVNPDGVYTEPRPIGTRYLPRNL

SEQ ID NO: 4795 - protein, 1458 aa, Adeno-associated virus
MAADGYLPDWLEDNLSEGIREWWDLKPGAPKPKANQQKQDDGRGLVLPGYKYLGPFNGLDKGEPVNAADAAALEHDKAYDQQLKAGDNPYLRYNHADAEFQERLQEDTSFGGNLGRAVFQAKKRVLEPLGLVEEGAKTAPGKKRPIDSPDSSTGIGKKGQQPAKKKLNFGQTGDSESVPDPQPLGEPPAAPSSVGSGTMAAGGGAPTADNNEGADGVGNASGNWHCDSTWLGDRVITTSTRTWALPTYNNHLYKQISSSSSGATNDNHYFGYSTPWGYFDFNRFHCHFSPRDWQRLINNNWGFRPKKLRFKLFNIQVKEVTTNDGVTTIANNLTSTVQVFSDSEYQLPYVLGSAHQGCLPPFPADVFMIPQYGYLTLNNGSQSVGRSSFYCLEYFPSQMLRTGNNFEFSYSFEDVPFHSSYAHSQSLDRLMNPLIDQYLYYLARTQSTTGSTRELQFHQAGPNTMAEQSKNWLPGPCYRQQRLSKNLDFNNNSNFAWTAATKYHLNGRNSLTNPGIPMATNKDDEDQFFPINGVLVFGKTGAANKTTLENVLMTSEEEIKTTNPVATEEYGVVSSNLQSSTAGPQSQTINSQGALPGMVWQNRDVYLQGPIWAKIPHTDGNFHPSPLMGGFGLEHPPPQILIKNTPVPANPPEVFTPAKFASFITQYSTGQVSVEIEWELQKENSKRWNPEIQYTSNYAKSNNVEFAVNPDGVYTEPRPIGTRYLTRNLMAADGYLPDWLEDNLSEGIREWWDLKPGAPKPKANQQKQDDGRGLVLPGYKYLGPFNGLDKGEPVNAADAAALEHDKAYDQQLKAGDNPYLRYNHADAEFQERLQEDTSFGGNLGRAVFQAKKRVLEPLGLVEEGAKTAPGKKRPIGSPDSSTGIGKKGQQPAKKKLNFGQTGDSESVPDPQPLGEPPAAPSSVGSGTMAAGGGAPMADNNEGADGVGNASGNWHCDSTWLGDRVITTSTRTWALPTYNNHLYKQISSSSSGATNDNHYFGYSTPWGYFDFNRFHCHFSPRDWQRLINNNWGFRPKKLRFKLLNIQVKEVTTNDGVTTIANNLTSTVQVFSDSEYQLPYVLGSAHQGCLPPFPADVFMIPQYGYLTLDNGSQSVGRSSFYCLEYFPSQMLRTGNNFEFSYSFEDVPFHSSYAHSQSLDRLMNPLIDQYLYYLARTQSTTGSTRELQFHQAGPNTMAEQSKNWLPGPCYRQQRLSKNLDFNNNSNFAWTAATKYHLNGRNSLTNPGIPMATNKDDEDQFFPINGVLVFGKTGAANKTTLENVLMTSEEEIKTTNPVATEEYGVVSSNLQSSTAGPQSQTINSQGALPGMVWQNRDVYLQGPIWAKIPHTDGNFHPSPLMGGFGLKHPPPQILIKNTPVPANPPEVFTPAKFASFITQYSTGQVSVEIEWELQKENSKRWNPEIQYTSNYAKSNNVEFAVNPDGVYTEPRPIGTRYLTRNL

SEQ ID NO: 4796 - protein, 729 aa, Adeno-associated virus
MAADGYLPDWLEDNLSEGIREWWDLKPGAPKPKANQQKQDDGRGLVLPGYKYLGPFNGLDKGEPVNAADAAALEHDKAYDQQLKAGDNPYLRYNHADAEFQERLQEDTSFGGNLGRAVFQAKKRVLEPLGLVEEGAKTAPGKKRPIDSPDSSTGIGKKGQQPAKKKLNFGQTGDSESVPDPQPLGEPPAAPSSVGSGTMAAGGGAPTADNNEGADGVGNASGNWHCDSTWLGDRVITTSTRTWALPTYNNHLYKQISSSSSGATNDNHYFGYSTPWGYFDFNRFHCHFSPRDWQRLINNNWGFRPKKLRFKLFNIQVKEVTTNDGVTTIANNLTSTVQVFSDSEYQLPYVLGSAHQGCLPPFPADVFMIPQYGYLTLNNGSQSVGRSSFYCLEYFPSQMLRTGNNFEFSYSFEDVPFHSSYAHSQSLDRLMNPLIDQYLYYLARTQSTTGSTRELQFHQAGPNTMAEQSKNWLPGPCYRQQRLSKNLDFNNNSNFAWTAATKYHLNGRNSLTNPGIPMATNKDDEDQFFPINGVLVFGKTGAANKTTLENVLMTSEEEIKTTNPVATEEYGVVSSNLQSSTAGPQSQTINSQGALPGMVWQNRDVYLQGPIWAKIPHTDGNFHPSPLMGGFGLEHPPPQILIKNTPVPANPPEVFTPAKFASFITQYSTGQVSVEIEWELQKENSKRWNPEIQYTSNYAKSNNVEFAVNPDGVYTEPRPIGTRYLTRNL

SEQ ID NO: 4797 - DNA, 3075 bp, Adeno-associated virus
  source 1..3075: mol_type = genomic DNA
tgagaactttcctttcaacgattgcgtcggacaagatggtgatctggtgggaggaggggaagatgaccgccaaggtcgtggagtcggccaaagccattcttggaggaagcaaggtgcgtgtggaccagaaatgcaagtcctcggcccagatagacccgactcccgtgatcgtcacctccaacaccaacatgtgcgccgtgattgacgggaactcaacgaccttcgagcaccagcagccgttgcaagaccggatgttcaaatttgaacttacccgccgtctggatcatgactttggaaaggtcaccaagcaggaagtgaaagactttttccggtgggcaaaggatcacgtggttgaggtggagcatgaattctacgtcaaaaagggtggagctaagaaaagacccgcccccagtgacgcagatataagtgagcccaaacgggcgcgcgagtcagttgcgcagccatcaacgtcagacgcggaagcttcgatcaactacgcggacaggtaccaaaaacaaatgttctcgtcacgtgggcatgaatctgatgctgtttccctgcagacaatgcgagagaatgaatcagaattcaaatatctgcttcactcacggacagaaagactgtttagagtgctttcccgtgtcagaatctcaacccgtttctgtcgtcaaaaaggcgtatcagaaactgtgctacattcatcatatcatgggaaaggtgccagacgcttgcactgcctgcgatctggtcaatgtggatttggatgactgcatctctgaacaataaatgatttaaatcaggtatggctgccgatggttatcctccagattggctcgaggacactctctctgaagggataagacagtggtggaagctcaaacctggcccaccaccaccaaagcccgcagagcggcataaggacgacagcaggggtcttgtgcttcctgggtacaagtacctcggacccttcaacggactcgacaagggggagccggtcaacgaggcagacgccgcggccctcgagcacgacaaggcctacgaccggcagctcgacagcggagacaacccgtacctcaagtacaaccacgccgacgcagagtttcaggagcgccttaaagaagatacgtcttttgggggcaacctcggacgagcagtcttccaggcgaaaaagagggttcttgaacctctgggcctggttgaggaacctgttaagacggctccgggaaaaaagaggccggtagagcactctcctgtggagccagactcctcctcgggaaccggaaaagcgggccagcggcctgcaagaaaaagattaaattttggtcagactggagacgcagactccgtacctgacccccagcctctcggacagccaccagcagccccctctggtctgggatctactacaatggctacaggcagtggcgcaccaatggcagacaataacgagggtgccgatggagtgggtaattcctcaggaaattggcattgcgattcccaatggctgggcgacagagtcatcaccaccagcacccgaacctgggccctgcccacatacaacaaccacctctacaagcaaatctccagccaatcaggagccagcaacgacaaccactactttggctacagcaccccctgggggtattttgacttcaacagattccactgccacttttcaccacgtgactggcaaagactcatcaacaacaactggggattccggcccaaaagactcaacttcaagctctttaatattcaagtcaaagaggtcacgcagaatgacggtacgacgacgattgccaataaccttaccagcacggttcaggtgtttactgactcggagtaccagctcccgtacgtcctgggctcggcgcatcaaggatgcctcccgccgtttccagcggacgtcttcatggtcccacagtatggatacctcaccctgaacaacgggagtcaggcggtaggacgctcttccttttactgcctggagtactttccttctcagatgctgcgtactggaaacaactttcagttcagctacacttttgaagacgtgcctttccacagcagctacgctcacagccagagtctggatcggctgatgaatcctctgatcgaccagtacctgtattatctgaacaagacacaaacaaatagtggaactcttcagcagtctcggctactgtttagccaagctggaccaaccaacatgtctcttcaagctaaaaactggctgcctggaccttgctacagacagcagcgtctgtcaaaacaggcaaacgacaacaacaacagcaactttccctggactgcagctacaaagtatcatctaaatggccgggactcgttggttaatccaggaccagctatggccagtcacaaggatgacgaagaaaagtttttccccatgcatggaaccctgatatttggtaaacaaggaacaaatgccaacgacgcggatttggaaaatgtcatgattacagatgaagaagaaatcagggccaccaatcccgtggctacggagcagtacgggactgtgtcaaataatttgcaaaactcaaacactggtccaactactggaactgtcaatcgccaaggagcgttacctggtatggtgtggcaggatcgagacgtgtacctgcagggacccatttgggccaagattcctcacaccgatggacactttcatccttctccactgatgggaggttttggactcaaacacccgcctcctcagatcatgatcaaaaacactcccgttccagccaatcctcccacaaacttcagttctgccaagtttgcttctttcatcacacagtattccacgggacaggtcagcgtggagatcgagtgggagctgcagaaggagaacagcaaacgctggaatcccgaaattcagtacacttccaactacaacaagtctgttaatgtggactttactgtggacactaatggtgtgtattcagagcctcgccccattggcaccagatacctgactcgtaatctgtaattgcttgttaatcaataaaccgtttaattcgtttcagttgaactttggtctctgcgaagggcgaa

SEQ ID NO: 4798 - DNA, 3142 bp, Adeno-associated virus
  source 1..3142: mol_type = genomic DNA
aaaacgacgggccagtgattgtaatacgactcactatagggcgaaattgaaattagcggccgcgaattcgcctttcgcagagaccaaagttcaactgaaacgaattaaacggtttattgattaacaagcaattacagattacgagtcaggtatctggtgccaatggggcgaggctctgaatacacaccattagtgtccacagtaaagtccacattaacagacttgttgtagttggaagtgtactgaatttcgggattccagcgtttgctgttctccttctgcagctcccactcgatctccacgctgacctgtcccgtggaatactgtgtgatgaaagaagcaaacttggcagaactgaagtttgtgggaggattggctggaacgggagtgtttttgatcatgatctgaggaggcgggtgtttgagtccaaaacctcccatcagtggagaaggatgaaagtgtccatcggtgtgaggaatcttggcccaaatgggtccctgcaggtacacgtctcgatcctgccacaccataccaggtaacgctccttggtgattgacagttccagtagttggaccagtgtttgagttttgcaaattatttgacacagtcccgtactgctccgtagccacgggattggtggccctgatttcttcttcatctgtaatcatgacattttccaaatccgcgtcgttggcatttgttccttgtttaccaaatatcagggttccatgcatggggaaaaacttttcttcgtcatccttgtgactggccatagctggtcctggattaaccaacgagtcccggccatttagatgatactttgtagctgcagtccagggaaagttgctgttgttgttgtcgtttgcctgttttgacagacgctgctgtctgtagcaaggtccaggcagccagtttttagcttgaagagacatgttggttggtccagcttggctaaacagtagccgagactgctgaagagttccactatttgtttgtgtcttgttcagataatacaggtactggtcgatcagaggattcatcagccgatccagactctggctgtgagcgtagctgctgtggaaaggcacgtcttcaaaagtgtagctgaactgaaagttgtttccagtacgcagcatctgagaaggaaagtactccaggcagtaaaaggaagagcgtcctaccgcctgactcccgttgttcagggtgaggtatccatactgtgggaccatgaagacgtccgctggaaacggcgggaggcatccttgatgcgccgagcccaggacgtacgggagctggtactccgagtcagtaaacacctgaaccgtgctggtaaggttattggcaatcgtcgtcgtaccgtcattctgcgtgacctctttgacttgaatattaaagagcttgaagttgagtcttttgggccggaatccccggttgttgttgacgagtctttgccagtcacgtggtgaaaagtggcagtggaatctgttgaagtcaaaatacccccagggggtgctgtagccaaagtagtggttgtcgttgctggctcctgattggctggagatttgcttgtagaggtggttgttgtatgtgggcagggcccaggttcgggtgctggtggtgatgactctgtcgcccagccattgggaatcgcaatgccaatttcctgaggaattacccactccatcggcaccctcgttattgtctgccattggtgcgccactgcctgtagccattgtagtagatcccagaccagagggggctgctggtggctgtccgagaggctgggggtcaggtacggagtctgcgtctccagtctgaccaaaatttaatctttttcttgcaggctgctggcccgcttttccggttcccgaggaggagtctggctccacaggagagtgctctaccggcctcttttttcccggagccgtcttaacaggctcctcaaccaggcccagaggttcaagaaccctctttttcgcctggaagactgctcgtccgaggttgcccccaaaagacgtatcttctttaaggcgctcctgaaactctgcgtcggcgtggttgtacttgaggtacgggttgtctccgctgtcgagctgccggtcgtaggccttgtcgtgctcgagggccgcggcgtctgcctcgttgaccggctcccccttgtcgagtccgttgaagggtccgaggtacttgtacccaggaagcacaagacccctgctgtcgtccttatgccgctctgcgggctttggtggtggtgggccaggtttgagcttccaccactgtcttattccttcagagagagtgtcctcgagccaatctggaagataaccatcggcagccatacctgatttaaatcatttattgttcagagatgcagtcatccaaatccacattgaccagatcgcaggcagtgcaagcgtctggcacctttcccatgatatgatgaatgtagcacagtttctgatacgcctttttgacgacagaaacgggttgagattctgacacgggaaagcactctaaacagtctttctgtccgtgagtgaagcagatatttgaattctgattcattctctcgcattgtctgcagggaaacagcatcagattcatgcccacgtgacgagaacatttgttttggtacctgtccgcgtagttgatcgaagcttccgcgtctgacgtcgatggctgcgcaactgactcgcgcgcccgtttgggctcacttatatctgcgtcactgggggcgggtcttttcttagctccaccctttttgacgtagaattcatgctccacctcaaccacgtgatcctttgcccaccggaaaaagtctttcacttcctgcttggtgacctttccaaagtcatgatccagacggcgggtaagttcaaatttgaacatccggtcttgcaacggctgctggtgctcgaaggtcgttgagttcccgtcaatcacggcgcacatgttggtgttggaggtgacgatcacgggagtcgggtctatctgggccgaggacttgcatttctggtccacacgcaccttgcttcctccaagaatggctttggccgactccacgaccttggcggtcatcttcccctcctcccaccagatcaccatcttgtcgacgcaatggtaaaaggaaagttctcattgg

SEQ ID NO: 4799 - DNA, 2208 bp, Adeno-associated virus
  source 1..2208: mol_type = genomic DNA
atggctgccgatggttatcttccagattggctcgaggacactctctctgaaggaataagacagtggtggaagctcaaacctggcccaccaccaccaaagcccgcagagcggcataaggacgacagcaggggtcttgtgcttcctgggtacaagtacctcggacccttcaacggactcgacaagggggagccggtcaacgaggcagacgccgcggccctcgagcacgacaaggcctacgaccggcagctcgacagcggagacaacccgtacctcaagtacaaccacgccgacgcagagtttcaggagcgccttaaagaagatacgtcttttgggggcaacctcggacgagcagtcttccaggcgaaaaagagggttcttgaacctctgggcctggttgaggaacctgttaagacggctccgggaaaaaagaggccggtagagcactctcctgtggagccagactcctcctcgggaaccggaaaagcgggccagcagcctgcaagaaaaagattaaattttggtcagactggagacgcagactccgtacctgacccccagcctctcggacagccaccagcagccccctctggtctgggatctactacaatggctacaggcagtggcgcaccaatggcagacaataacgagggtgccgatggagtgggtaattcctcaggaaattggcattgcgattcccaatggctgggcgacagagtcatcaccaccagcacccgaacctgggccctgcccacatacaacaaccacctctacaagcaaatctccagccaatcaggagccagcaacgacaaccactactttggctacagcaccccctgggggtattttgacttcaacagattccactgccacttttcaccacgtgactggcaaagactcatcaacaacaactggggattccggcccaaaagactcaacttcaagctctttaatattcaagtcaaagaggtcacgcagaatggcggtacgacgacgattgccaataaccttaccagcacggttcaggtgtttactgactcggagtaccagctcccgtacgtcctgggctcggcgcatcaaggatgcctcccgccgtttccagcggacgtcttcatggtcccacagtatggatacctcaccctgaacaacgggagtcaggcggtaggacgctcttccttttactgcctggagtactttccttctcagatgctgcgtactggaaacaactttcagttcagctacacttttgaagacgtgcctttccacagcagctacgctcacagccagagtctggatcggctgatgaatcctctgatcgaccagtacctgtattatctgaacaagacacaaacaaatagtggaactcttcagcagtctcggctactgtttagccaagctggaccaaccaacatgtctcttcaagctaaaaactggctgcctggaccttgctacagacagcagcgtctgtcaaaacaggcaaacggcaacaacaacagcaactttccctggactgcagctacaaagtatcatctaaatggccgggactcgttggttaatccaggaccagctatggccagtcacaaggatgacgaagaaaagtttttccccatgcatggaaccctgatatttggtaaacaaggaacaaatgccaacgacgcggatttggaaaatgtcatgattacagatgaagaagaaatcagggccaccaatcccgtggctacggagcagtacgggactgtgtcaaataatttgcaaaactcaaacactggtccaactactggaactgtcaatcaccaaggagcgttacctggtatggtgtggcaggatcgagacgtgtacctgcagggacccatttgggccaagattcctcacaccgatggacactttcatccttctccactgacgggaggttttggactcaaacacccgcctcctcagatcatgatcaaaaacactcccgttccagccaatcctcccacaaacttcagttctgccaagtttgcttctttcatcacacagtattccacgggacaggtcagcgtggagatcgagtgggagctgcagaaggagaacagcaaacgctggaatcccgaaattcagtacacttccaactacaacaagtctgttaatgtggactttactgtggacactaatggtgtgtattcagagcctcgccccattggcaccagatacctgactcgtaatctgtaa

SEQ ID NO: 4800 - protein, 735 aa, Adeno-associated virus
MAADGYLPDWLEDTLSEGIRQWWKLKPGPPPPKPAERHKDDSRGLVLPGYKYLGPFNGLDKGEPVNEADAAALEHDKAYDRQLDSGDNPYLKYNHADAEFQERLKEDTSFGGNLGRAVFQAKKRVLEPLGLVEEPVKTAPGKKRPVEHSPVEPDSSSGTGKAGQQPARKRLNFGQTGDADSVPDPQPLGQPPAAPSGLGSTTMATGSGAPMADNNEGADGVGNSSGNWHCDSQWLGDRVITTSTRTWALPTYNNHLYKQISSQSGASNDNHYFGYSTPWGYFDFNRFHCHFSPRDWQRLINNNWGFRPKRLNFKLFNIQVKEVTQNGGTTTIANNLTSTVQVFTDSEYQLPYVLGSAHQGCLPPFPADVFMVPQYGYLTLNNGSQAVGRSSFYCLEYFPSQMLRTGNNFQFSYTFEDVPFHSSYAHSQSLDRLMNPLIDQYLYYLNKTQTNSGTLQQSRLLFSQAGPTNMSLQAKNWLPGPCYRQQRLSKQANGNNNSNFPWTAATKYHLNGRDSLVNPGPAMASHKDDEEKFFPMHGTLIFGKQGTNANDADLENVMITDEEEIRATNPVATEQYGTVSNNLQNSNTGPTTGTVNHQGALPGMVWQDRDVYLQGPIWAKIPHTDGHFHPSPLTGGFGLKHPPPQIMIKNTPVPANPPTNFSSAKFASFITQYSTGQVSVEIEWELQKENSKRWNPEIQYTSNYNKSVNVDFTVDTNGVYSEPRPIGTRYLTRNL

SEQ ID NO: 4801 - DNA, 2208 bp, Adeno-associated virus
  source 1..2208: mol_type = genomic DNA
atggctgccgatggttatcttccagattggctcgaggacactctctctgaaggaataagacagtggtggaagctcaaacctggcccaccaccaccaaagctcgcagagcggcatcaggacgacagcaggggtcttgtgcttcctgggtacaagtacctcggacccttcaacggactcgacaaaggagagccggtcaacgaggcagacgccgcggccctcgagcacgacaaggcctacgaccggcagctcgacagcggagacaacccgtacctcaagtacaaccacgccgacgcggagtttcaggagcgtcttaaagaagatacgtcttttgggggcaacctcggacgagcagtcttccaggcgaaaaagagggttcttgaacctctgggcctggttgaggaacctgttaagacggctccgggaaaaaagaggccggtagagcactctcctgtggagccagactcctcctcgggaaccggaaaggcgggccatcagcctgcgagaaagagattgaattttggtcagactggagacgcagactccgtacctgacccccagcctctcggacagccaccagcagcccccacaagtctgggatctactacaatggctacaggcagtggcgcaccaatggcagacaataacgagggtgccgatggagtgggtaattcctcaggaaattggcattgcgattcccaatggctgggcgacagagtcatcaccaccagcacccgaacctgggccctgcccacctacaacaaccacctctacaagcaaatctccagccaatcaggagcctcgaacgacaaccactactttggctacagcaccccctgggggtattttgacttcaacagattccactgtcacttctccccacgtgattggcaaagactcatcaacaacaactggggattccgacccaagagactcaacttcaagctctttaacattcaagtcaaagaggtcacgcagaatgacggtacgacgacgattgccaataaccttaccagcacggttcaggtgtttactgactcggagtaccagctcccgtacgtcctcggctcggcgcatcaaggatgcctcccgccgtttccagcggacgtcttcacggtcccacagtatggatacctcaccctgaacaacgggagtcaggcggtaggacgctcttccttttactgcctggagtactttccttctcagatgctgcgtactggaaacaaccttaccttcagctacacctttgaggacgttcctttccacagcagctacgctcacagccagagtttggaccggctgatgaatcctctgatcgaccagtatctatattatctgaacaggacacaatcaaatagtggaactcttcagcagtctaggctactgtttagccaagctggacccaccagcatgtctcttcaagctaaaaactggctgcctggaccttgctacagacagcagcgtctttcaaagcaggcaaacgacaacaacaacagcaactttccctggactgcggctacaaagtatcatctaaatggccgggactcgttggttaatccaggaccagctatggccagccacaaagacgatgaagaaaagtttttccccatgcatggaaccctgatatttggtaaacaaggaacaaatgctaacgacgcggatttggagcatgttatgattacagatgaagaagaaatcaggaccaccaatcctgtggctacagagcagtacggaaacgtgtcaaataatttgcaaaactcaaatactggtccaactacagaaaatgtcaatcaccagggagcgttacctggtatggtgtggcaggatcgagacgtgtacctgcagggacccatttgggccaagattcctcacaccgacggacactttcacccttctccactgatgggaggttttggactcaaacacccgcctcctcaaatcatgatcaaaaacactcccgttccagccaatcctcccacaaactacagttctgccaagtttgcttctttcatcacacagtattccacgggccaggtcagcgtggagattgagtgggagctgcggaaggagaacagcaaacgctggaaccccgagatccagtatacttccaactacaacaaatctgttaatgtggactttactgtggacactaatggtgtgtattcagagcctcgccccattggcaccagatacctgactcgtaatctgtaa

SEQ ID NO: 4802 - protein, 735 aa, Adeno-associated virus
MAADGYLPDWLEDTLSEGIRQWWKLKPGPPPPKLAERHQDDSRGLVLPGYKYLGPFNGLDKGEPVNEADAAALEHDKAYDRQLDSGDNPYLKYNHADAEFQERLKEDTSFGGNLGRAVFQAKKRVLEPLGLVEEPVKTAPGKKRPVEHSPVEPDSSSGTGKAGHQPARKRLNFGQTGDADSVPDPQPLGQPPAAPTSLGSTTMATGSGAPMADNNEGADGVGNSSGNWHCDSQWLGDRVITTSTRTWALPTYNNHLYKQISSQSGASNDNHYFGYSTPWGYFDFNRFHCHFSPRDWQRLINNNWGFRPKRLNFKLFNIQVKEVTQNDGTTTIANNLTSTVQVFTDSEYQLPYVLGSAHQGCLPPFPADVFTVPQYGYLTLNNGSQAVGRSSFYCLEYFPSQMLRTGNNLTFSYTFEDVPFHSSYAHSQSLDRLMNPLIDQYLYYLNRTQSNSGTLQQSRLLFSQAGPTSMSLQAKNWLPGPCYRQQRLSKQANDNNNSNFPWTAATKYHLNGRDSLVNPGPAMASHKDDEEKFFPMHGTLIFGKQGTNANDADLEHVMITDEEEIRTTNPVATEQYGNVSNNLQNSNTGPTTENVNHQGALPGMVWQDRDVYLQGPIWAKIPHTDGHFHPSPLMGGFGLKHPPPQIMIKNTPVPANPPTNYSSAKFASFITQYSTGQVSVEIEWELRKENSKRWNPEIQYTSNYNKSVNVDFTVDTNGVYSEPRPIGTRYLTRNL

SEQ ID NO: 4803 - DNA, 2208 bp, Adeno-associated virus
  source 1..2208: mol_type = genomic DNA
atggctgccgatggttatcttccagattggctcgaggacactctctctgaaggaataagacagtggtggaagctcaaacctggcccaccaccaccaaagcccgcagagcggcatcaggacgacagcaggggtcttgtgcttcctgggtacaagtacctcggacccttcaacggactcgacaaaggagagccggtcaacgaggcagacgccgcggccctcgagcacgacaaggcctacgaccggcagctcgacagcggagacaacccgtacctcaagtacaaccacgccgacgcggagtttcaggagcgtcttaaagaagatacgtcttttgggggcaacctcggacgagcagtcttccaggcgaaaaagagggttcttgaacctctgggcctggttgaggaacctgttaagacggctccgggaaaaaagaggccggtagagcactctcctgtggagccagactcctcctcgggaaccggaaaagcgggccatcagcctgcgagaaagagattgaattttggtcagactggagacgcagactccgtacctgacccccagcctctcggacagccaccagcagcccccacaagtttgggatctactacaatggctacaggcagtggcgcaccaatggcagacaataacgagggtgccgatggagtgggtaattcctcaggaaattggcattgcgattcccaatggctgggcgacagagtcatcaccaccagcacccgaacctgggccctgcccacctacaacaaccacctctacaagcaaatctccagccaatcaggagcctcgaacgacaaccactactttggctacagcaccccctgggggtattttgacttcaacagattccactgtcacttctccccacgtgattggcaaagactcatcaacaacaactggggattccgacccaagagactcaacttcaagctctttaacattcaagtcaaggaggtcacgcagaatgacggtacgacgacgattgccaataaccttaccagcacggttcaggtgtttactgactcggagtaccagctcccgtacgtcctcggctcggcgcatcaaggatgcctcccgccgtttccagcggacgtcttcatggtcccacagtatggatacctcaccctgaacaacgggagtcaggcggtaggacgctcttccttttactgcctggagtactttccttctcagatgctgcgtactggaaacaactttaccttcagctacacctttgaggacgttcctttccacagcagctacgctcacagccagagtttggaccggctgatgaatcctctgatcgaccagtatctatattatctgaacaggacacaatcaaatagtggaactcttcagcagtctaggctactgtttagccaagctggacccaccagcatgtctcttcaagctaaaaactggctgcctggaccttgctacagacagcagcgtctttcaaagcaggcaaacgacaacaacaacagcaactttccctggactgcggctacaaagtatcgtctaaatggccgggactcgttggttaatccaggaccagctatggccagccacaaagacgatgaagaaaagtttttccccatgcatggaaccctgatatttggtaaacaaggaacaaatgctaacgacgcggatttggagcatgttatgattacagatgaagaagaaatcaggaccaccaatcctgtggctacagagcagtacggaaacgtgtcaaataatttgcaaaactcaaatactggtccaactacagaaaatgtcaatcaccagggagcgttacctggtatggtgtggcaggatcgagacgtgtacctgcagggacccatttgggccaagattcctcacaccgacggacactttcacccttctccactgatgggaggttttggactcaaacacccgcctcctcaaatcatgatcaaaaacactcccgttccagccaatcctcccacaaacttcagttctgccaagtttgcttctttcatcacacagtattccacgggccaggtcagcgtggagattgagtgggagctgcagaaggagaacagcaaacgctggaaccccgagatccagtatacttccaactacaacaaatctgttaatgtggactttactgtggacactaatggtgtgtattcagagcctcgccccattggcaccagatacctgactcgtaatctgtaa

SEQ ID NO: 4804 - protein, 735 aa, Adeno-associated virus
MAADGYLPDWLEDTLSEGIRQWWKLKPGPPPPKPAERHQDDSRGLVLPGYKYLGPFNGLDKGEPVNEADAAALEHDKAYDRQLDSGDNPYLKYNHADAEFQERLKEDTSFGGNLGRAVFQAKKRVLEPLGLVEEPVKTAPGKKRPVEHSPVEPDSSSGTGKAGHQPARKRLNFGQTGDADSVPDPQPLGQPPAAPTSLGSTTMATGSGAPMADNNEGADGVGNSSGNWHCDSQWLGDRVITTSTRTWALPTYNNHLYKQISSQSGASNDNHYFGYSTPWGYFDFNRFHCHFSPRDWQRLINNNWGFRPKRLNFKLFNIQVKEVTQNDGTTTIANNLTSTVQVFTDSEYQLPYVLGSAHQGCLPPFPADVFMVPQYGYLTLNNGSQAVGRSSFYCLEYFPSQMLRTGNNFTFSYTFEDVPFHSSYAHSQSLDRLMNPLIDQYLYYLNRTQSNSGTLQQSRLLFSQAGPTSMSLQAKNWLPGPCYRQQRLSKQANDNNNSNFPWTAATKYRLNGRDSLVNPGPAMASHKDDEEKFFPMHGTLIFGKQGTNANDADLEHVMITDEEEIRTTNPVATEQYGNVSNNLQNSNTGPTTENVNHQGALPGMVWQDRDVYLQGPIWAKIPHTDGHFHPSPLMGGFGLKHPPPQIMIKNTPVPANPPTNFSSAKFASFITQYSTGQVSVEIEWELQKENSKRWNPEIQYTSNYNKSVNVDFTVDTNGVYSEPRPIGTRYLTRNL

SEQ ID NO: 4805 - DNA, 2208 bp, Adeno-associated virus
  source 1..2208: mol_type = genomic DNA
atggctgccgatggttatcttccagattggctcgaggacactctctctgaaggaataagacagtggtggaagctcaaacctggcccaccaccaccaaagcccgcagagcggcatcaggacgacagcaggggtcttgtgcttcctgggtacaagtacctcggacccttcaacggactcgacaaaggagagccggtcaacgaggcagacgccgcggccctcgagcacgacaaggcctacgaccggcagctcgacagcggagacaacccgtacctcaagtacaaccacgccgacgcggagtttcaggagcgtcttaaagaagatacgtcttttgggggcaacctcggacgagcagtcttccaggcgaaaaagagggttcttgaacctctgggcctggttgaggaacctgttaagacggctccgggaaaaaagaggccggtagagcactctcctgtggagccagactcctcctcgggaaccggaaaagcgggccatcagcctgcgagaaagagattgaattttggtcagactggagacgcagactccgtacctgacccccagcctctcggacagccaccagcagcccccacaagtttgggatctactacaatggctacaggcagtggcgcaccaatggcagacaataacgagggtgccgatggagtgggtaattcctcaggaaattggcattgcgattcccaatggctgggcgacagagtcatcaccaccagcacccgaacctgggccctgcccacctacaacaaccacctctacaagcaaatctccagccaatcaggagcctcgaacgacaaccactactttggctacagcaccccctgggggtattttgacttcaacagattccactgtcacttctccccacgtgattggcaaagactcatcaacaacaactggggattccgacccaagagactcaacttcaagctctttaacattcaagtcaaagaggtcacgcagaatgacggtacgacgacgattgccaataaccttaccagcacggttcaggtgtttactgactcggagtaccagctcccgtacgtcctcggctcggcgcatcaaggatgcctcccgccgtttccagcggacgtcttcatggtcccacagtatggatacctcaccctgaacaacgggagtcaggcggtaggacgcccttccttttactgcctggagtactttccttctcagatgctgcgtactggaaacaactttaccttcagctacacctttgaggacgttcctttccacagcagctacgctcacagccagagtttggaccggctgatgaatcctctgatcgaccagtatctatattatctgaacaggacacaatcaaatagtggaactcttcagcagtctaggctactgtttagccaagctggacccaccagcatgtctcttcaagctaaaaactggctgcctggaccttgctacagacagcagcgtctttcaaagcaggcaaacgacaacaacaacagcaactttccctggactgcggctacaaagtatcatctaaatggccgggactcgttggttaatccaggaccagctatggccagccacaaagacgatgaagaaaagtttttccccatgcatgggaccctgatatttggtaaacaaggaacaaatgctaacgacgcggatttggagcatgttatgattacagatgaagaagaaatcaggaccaccaatcctgtggctacagagcagtacggaaacgtgtcaaataatttgcaaaactcaaatactggtccaactacagaaaatgtcaatcaccagggagcgttacctggtatggtgtggcaggatcgagacgtgtacctgcagggacccatttgggccaagattcctcacaccgacggacactttcacccttctccactgatgggaggttttggactcaaacacccgcctcctcaaatcatgatcaaaaacactcccgttccagccaatcctcccacaaacttcagttctgccaagtttgcttctttcatcacacagtattccacgggccaggtcagcgtggagattgagtgggagctgcagaaggagaacagcaaacgctggaaccccgagatccagtatacttccaactacaacaaatctgttaatgtggactttactgtggacactaatggtgtgtattcagagcctcgccccattggcaccagatacctgactcgtaatctgtaa

SEQ ID NO: 4806 - protein, 735 aa, Adeno-associated virus
MAADGYLPDWLEDTLSEGIRQWWKLKPGPPPPKPAERHQDDSRGLVLPGYKYLGPFNGLDKGEPVNEADAAALEHDKAYDRQLDSGDNPYLKYNHADAEFQERLKEDTSFGGNLGRAVFQAKKRVLEPLGLVEEPVKTAPGKKRPVEHSPVEPDSSSGTGKAGHQPARKRLNFGQTGDADSVPDPQPLGQPPAAPTSLGSTTMATGSGAPMADNNEGADGVGNSSGNWHCDSQWLGDRVITTSTRTWALPTYNNHLYKQISSQSGASNDNHYFGYSTPWGYFDFNRFHCHFSPRDWQRLINNNWGFRPKRLNFKLFNIQVKEVTQNDGTTTIANNLTSTVQVFTDSEYQLPYVLGSAHQGCLPPFPADVFMVPQYGYLTLNNGSQAVGRPSFYCLEYFPSQMLRTGNNFTFSYTFEDVPFHSSYAHSQSLDRLMNPLIDQYLYYLNRTQSNSGTLQQSRLLFSQAGPTSMSLQAKNWLPGPCYRQQRLSKQANDNNNSNFPWTAATKYHLNGRDSLVNPGPAMASHKDDEEKFFPMHGTLIFGKQGTNANDADLEHVMITDEEEIRTTNPVATEQYGNVSNNLQNSNTGPTTENVNHQGALPGMVWQDRDVYLQGPIWAKIPHTDGHFHPSPLMGGFGLKHPPPQIMIKNTPVPANPPTNFSSAKFASFITQYSTGQVSVEIEWELQKENSKRWNPEIQYTSNYNKSVNVDFTVDTNGVYSEPRPIGTRYLTRNL

SEQ ID NO: 4807 - DNA, 2208 bp, Adeno-associated virus
  source 1..2208: mol_type = genomic DNA
atggctgccgatggttatcttccagattggctcgaggacactctctctgaaggaataagacagtggtggaagctcaaacctggcccaccaccaccaaagcccgcagagcggcataaggacgacagcaggggtcttgtgcttcctgggtacaagtacctcggacccttcaacggactcgacaagggagagccggtcaacgaggcagacgccgcggccctcgagcacgacaaggcctacgaccggcagctcgacagcggagacaacccgtacctcaagtacaaccacgccgacgcggagtttcaggagcgccttaaagaagatacgtcttttgggggcaacctcggacgagcagtcttccaggcaaaaaagagggttcttgaacctctgggcctggttgaggagcctgttaaaacggctccgggaaaaaagaggccggtagagcactctcctgcggagccagactcctcctcgggaaccggaaaagcgggccagcagcctgcaagaaaaagattgaatttcggtcagactggagacgcagactccgtacctgacccccagcctctcggacagccaccagcagccccctctggtctgggaactaatacgatggcttcaggcagtggcgcaccaatggcagacaataacgagggcgccgacggagtgggtaattcctcgggaaattggcattgcgattccacatggatgggcgacagagtcatcaccaccagcacccgaacttgggccctgcccacctacaacaaccatctctacaagcaaatctccagccaatcaggagccagcaacgacaaccactactttggctacagcaccccttgggggtattttgacttcaacagattccactgccacttttcaccacgtgactggcaaagactcatcaacaacaactggggattccggcccaagagactcaacttcaagctctttaacattcaagtcaaagaggtcacgcagaatgacggtacgacgacgattgccaataaccttaccagcacggttcaggtgtttactgactcggagtaccagctcccgtacgtcctcggctcggcgcatcaaggatgcctcccgccgttcccagcagacgtcttcatggtgccacagtatggatacctcaccctgaacaacgggagtcaggcagtaggacgctcttcattttactgcctggagtactttccttctcagatgctgcgtaccggaaacaactttaccttcagctacacctttgaggacgttcctttccacagcagctacgctcacagccagagtttggaccgtctcatgaatcctctcatcgaccagtacctgtattacttgagcagaacaaacactccaagcggaaccaccacgcagtccaggcttcagttttctcaggccggagcaagtgacattcgggaccagtctaggaactggcttcctggaccctgttaccgccagcagcgagtatcaaagacatctgcggataacaacaacagtgaatactcgtggactggagctaccaagtaccacctcaatggcagagactctctggtgaatccgggcccggccatggccagccacaaggacgatgaagaaaagttttttcctcagagcggggttctcatctttgggaagcaaggctcagagaaaacaaatgtggacattgaaaaggtcatgattacagacgaagaggaaatcaggaccaccaatcccgtggctacggagcagtatggttctgtatctaccaacctgcagggcggcaacacacaagcagctaccgcagatgtcaacacacaaggcgttcttccaggcatggtctggcaggacagagacgtgtacctgcaggggcccatctgggcaaagattccacacacggacggacattttcacccctctcccctcatgggcggattcggacttaaacaccctcctccacagattctcatcaagaacaccccggtacctgcgaatccttcgaccaccttcagtgcggcaaagtttgcttctttcatcacacagtattccacggggcaggtcagcgtggagatcgagtgggagctgcagaaggagaacagcaaacgctggaatcccgagatccagtacacttccaactacaacaaatctgttaatgtggactttactgttgacactaatggcgtgtattcagagcctcgccccattggcaccagatacctgactcgtaatctgtaa

SEQ ID NO: 4808 - protein, 735 aa, Adeno-associated virus
MAADGYLPDWLEDTLSEGIRQWWKLKPGPPPPKPAERHKDDSRGLVLPGYKYLGPFNGLDKGEPVNEADAAALEHDKAYDRQLDSGDNPYLKYNHADAEFQERLKEDTSFGGNLGRAVFQAKKRVLEPLGLVEEPVKTAPGKKRPVEHSPAEPDSSSGTGKAGQQPARKRLNFGQTGDADSVPDPQPLGQPPAAPSGLGTNTMASGSGAPMADNNEGADGVGNSSGNWHCDSTWMGDRVITTSTRTWALPTYNNHLYKQISSQSGASNDNHYFGYSTPWGYFDFNRFHCHFSPRDWQRLINNNWGFRPKRLNFKLFNIQVKEVTQNDGTTTIANNLTSTVQVFTDSEYQLPYVLGSAHQGCLPPFPADVFMVPQYGYLTLNNGSQAVGRSSFYCLEYFPSQMLRTGNNFTFSYTFEDVPFHSSYAHSQSLDRLMNPLIDQYLYYLSRTNTPSGTTTQSRLQFSQAGASDIRDQSRNWLPGPCYRQQRVSKTSADNNNSEYSWTGATKYHLNGRDSLVNPGPAMASHKDDEEKFFPQSGVLIFGKQGSEKTNVDIEKVMITDEEEIRTTNPVATEQYGSVSTNLQGGNTQAATADVNTQGVLPGMVWQDRDVYLQGPIWAKIPHTDGHFHPSPLMGGFGLKHPPPQILIKNTPVPANPSTTFSAAKFASFITQYSTGQVSVEIEWELQKENSKRWNPEIQYTSNYNKSVNVDFTVDTNGVYSEPRPIGTRYLTRNL

SEQ ID NO: 4809 - DNA, 3161 bp, Adeno-associated virus
  source 1..3161: mol_type = genomic DNA
gattgaatttagcggccgcgaattcgcccttgctgcgtcaactggaccaatgagaactttccattcaatgattgcgtcgacaagatggtgatctggtgggaggagggaaagatgaccgccaaggtcatggagtcggccaaagccattctcggaggaagcaaggtgcgcgtggaccagaaatgtaagtcctcggcccagatagacccgactcccgtgattgtcacctccaacaccaacatgtgcgccgtgattgacgggaactcaacgaccttcgagcaccagcagccgttgcaagaccggatgttcaaatttgaactcacccgccgtctggatcatgactttgggaaggtcaccaagcaggaagtcaaagactttttccggtgggcaaaggatcacgtggttgaggtggagcatgaattctacgtcaaaaagggtggagccaagaaaagacccgcccccagtgacgcagatataagtgagcccaaacgggcgcgcgggtcagttgcgcagccatcgacgtcagacgcggaagcttcgatcaactacgcggacaggtaccaaaacaaatgttctcgtcacgtgggcatgaatctgatgctgtttccctgcagacaatgcgagagaatgaatcaaaattcaaatatctgcttcactcacggacagaaggactgtttagagtgctttcccgtgtcagaatctcaacccgtttctgtcgtcaaaaaggcgtatcagaaactttgctacattcatcatatcatgggaaaggtgccagacgcttgcactgcctgcgatctggtcaatgtggatttggatgactgcatctctgaacaataaatgatttaaatcaggtatggctgccgatggttatcttccagattggctcaaggacactctctctgaaggaataagacagtggtggaagctcaaacctggcccaccaccaccaaagcccgcagagcggcataaggacgacagcgggggtcttgtgcttcctgggtacaagtacctcggacccttcaacggactcgacaagggagagccggtcaacgaggcagacgccgcggccctcgagtacgacaaggcctacgaccggcagctcgacagcggagacaacccgtacctcaagtacaaccacgccgacgcggagtttcaggagcgccttaaagaagatacgtcttttgggggcaacctcggacgagcagtcttccaggcgaaaaagagggttcttgaacctctgggcctggttgaggaacctgttaagacggctccgggaaaaaagaggccggtagagcactctcctgtggagccagactcctcctcgggaacaggaaaagcgggccagcagcctgcgagaaagagattgaattttggtcagactggagacgcagactccgtacctgacccccagcctctcggacagccaccagcagccccctctggtctgggaactaatacgatggctacaggcagtggcgcaccaatggcagacaataacgagggcgccgacggagtgggtaattcctcgggaagttggcattgcgattccacatggatgggcgacagagtcatcaccaccagcacccgaacctgggctctgcccacctacaacaaccatctgtacaagcagatctccagccaatcaggagccagcaacgacaaccactactttggctacagcaccccttgggggtattttgacttcaacagattccactgccacttttcaccacgtgactggcaaagactcatcaacaacaactggggattccggcccaagagactcaacttcaagctctttaacattcaagtcaaggaggtcacgcagaatgacggtacgacgacgattgccaataaccttaccagcacggttcaggtgtttactgactcggagtaccagctcccgtacgtccccggctcggcgcatcaaggatgcctcccgccgttcccagcagacgtcttcatggtgccacagtatggatacctcaccctgaacaacgggagtcaggcagtaggacgctcttcattttactgcctggagtactttccttctcagatgcttcgtaccggaaacaactttaccttcagctacacctttgaggatgttcctttccacagcagctacgctcacagccagagtttggaccgtctcatgaatcctctcatcgaccagtacctgtattacttgagcagaacaaacactccaagcggaaccaccacgcagtccaggcttcagttttctcaggccggagcaagtgacattcgggaccagtctaggaactggcttcctggaccctgttaccgccagcagcgagtatcaaagacagctgcggacaacaacaacagtgaatactcgtggactggagctaccaagtaccacctcaatggcagagactctctggtgaatccgggcccggccatggccagccacaaggacgatgaagaaaagttttttcctcaaagcggggttctcatctttgggaagcaaggctcagagaaaacaaatgtggacattgaaaaggtcatgattacagacgaagaggaaatcagaaccaccaatcccgtggccacggagcagtatggttctgtatctaccaacctccagagcggcaacacacaagcagctactgcagatgtcaacacacaaggcgttcttccaggcatggtctggcaggacagagacgtgcacctgcaggggcctatctgggcaaagattccacacacggacggacattttcacccctctcccctcatgggcggatttggacttaaacaccctcctccacagattctcatcaagaacaccccggtacctgcaaatccttcgaccaccttcagtgcggcaaagtttgcttccttcatcacacagtattccacagggcaggtcagcgtggagatcgagtgggagctgcagaaggagaacagcaaacgctggaaccccgagatccagtacacttccaactacaacaaatctgttaatgtggactttactgtggacactaatggtgtgtattcagagcctcgccccattggcaccagatacctgactcgtaatctgtaattgcttgttaatcaataaaccgtttaattcgtttcagttgaactttggtctctgcgaagggcgaattcgtttaaaccctgcaggactagtccctttagtgagg

SEQ ID NO: 4810 - DNA, 3162 bp, Adeno-associated virus
  source 1..3162: mol_type = genomic DNA
gaattgaatttagcggccgcgaattcgcccttcgcagagaccaaagttcaactgaaacgaattaaacggtttattgattaacaagcaattacagattacgagtcaggtatctggtgccaatggggcgaggctctgaatacacgccattagtgtccacagtaaagtccacattaacagacttgttgtagttggaagtgtactgaatttcgggattccagcgtttgctgttttccttctgcagctcccactcgatctccacgctgacctgtcccgtggagtactgtgtgatgaaggaagcaaactttgccgcactgaaggtggtcgaaggattcgcaggtaccggggtgttcttgatgagaatctgtggaggagggtgtttaagtccgaatccacccatgaggggagaggggtgaaaatgtccgtccgtgtgtggaatctttgcccagatgggcccctgaaggtacacatctctgtcctgccagaccatgcctggaagaacgccttgtgtgttgacatctgcggtagctgcttgtctgttgcctctctggaggttggtagatacagaaccgtactgctccgtagccacgggattggttgtcctgatttcctcttcgtctgtaatcatgaccttttcaatgtccacatttgttttctctgagccttgcttcccaaagatgagaaccccgctctgaggaaaaaacttttcttcattgtccttgtggcttgccatggccgggcccggattcaccagagagtctctgccattgaggtggtacttggtagctccagtccacgagtattcactgttgttgttatccgcagatgtctttgatactcgctgctggcggtaacagggtccaggaagccagttcctagactggtcccgaatgtcactcgctccggcctgagaaaactgaagccttgactgcgtggtggttccacttggagtgtttgttgtgctcaagtaatacaggtactggtcgatgagaggattcatgagacggtccagactctggctgtgagcgtagccgctgtggaaaggaacgtcctcaaaagtgtagctgaaggtaaagttgtttccggtacgcagcatctgagaaggaaagtactccaggcagtaaaatgaagagcgtcctactgcctgactcccgttgttcagggtgaggtatccatactgtggcaccatgaagacgtctgctgggaacggcgggaggcatccttgatgcgccgagccgaggacgtacgggagctggtactccgagtcagtaaacacctgaaccgtgctggtaaggttattggcaatcgtcgtcgtaccgtcattctgcgtgacctctttgacttgaatgttaaagagcttgaagttgagtctcttgggtcggaatccccagttgttgttgatgagtctttgccagtcacgtggtgaaaagtggcagtggaatctgttgaagtcaaaatacccccaaggggtgctgtagccaaagtagtgattgtcgttcgaggctcctgattggctggaaatttgtttgtagaggtggttgttgtaggtgggcagggcccaggttcgggtgctggtggtgatgactctgtcgcccatccatgtggaatcgcaatgccaatttcccgaggaattacccactccgtcggcgccctcgttattgtctgccattggtgcgccactgcctgtagccatcgtattagttcccagaccagagggggctgctggtggctgtccgagaggctgggggtcaggtactgagtctgcgtctccagtctgaccaaaattcaatctttttcttgcaggctgctggcccgcctttccggttcccgaggaggagtctggctccacaggagagtgctctaccggcctcttttttcctggagccgtcttgacaggttccccaaccaggcccagaggttcaagaaccctctttttcgcctggaagactgctcgtccgaggttgcccccaaaagacgtatcttctttaaggcgctcctgaaactccgcgtcggcgtggttgtacttgaggtacgggttgtctccgctgtcgagctgccggtcgtaggctttgtcgtgctcgagggccgcggcgtctgcctcgttgaccggctctcccttgtcgagtccgttgaagggtccgaggtacttgtacccaggaagcacaagacccctgctgtcgtccttatgccgctctgcgggctttggtggtggtgggccaggtttgagcttccaccactgtcttattccttcagagagagtgtcctcgagccaatctggaagataaccatcggcagccatacctgatttaaatcatttattgttcaaagatgcagtcatccaaatccacattgaccagatcgcaggcagtgcaagcgtctggcacctttcccatgatatgatgaatgtagcacagtttctgatacgcctttttgacgacagaaacgggttgagattctgacacgggaaagcactctaaacagtctttctgtccgtgagtgaagcagatatttgaattctgattcattctctcgcattgtctgcagggaaacagcatcagattcatgcccacgtgacgagaacatttgttttggtacctgtctgcgtagttgatcgaagcttccgcgtctgacgtcgatggctgcgcaactgactcgcgcacccgtttgggctcacttatatctgcgtcactgggggcgggtcttttcttggctccaccctttttgacgtagaattcatgctccacctcaaccacgtgatcctttgcccaccggaaaaagtctttgacttcctgcttggtgaccttcccaaagtcatgatccagacggcgggtgagttcaaatttgaacatccggtcttgcaacggctgctggtgttcgaaggtcgttgagttcccgtcaatcacggcgcacatgttggtgttggaggtgacgatcacgggagtcgggtctatctgggccgaggacttgcatttctggtccacgcgcaccttgcttcctccgagaatggctttggccgactccacgaccttggcggtcatcttcccctcctcccaccagatcaccatcttgtcgacacagtcgttgaagggaaagttctcattggtccagttgacgcagcaagggcgaattcgtttaaacctgcaggactagtccctttagtgaggg

SEQ ID NO: 4811 - DNA, 3164 bp, Adeno-associated virus
  source 1..3164: mol_type = genomic DNA
gcgaattgaatttagcggccgcgaattcgcccttcgcagagaccaaagttcaactgaaacgaattaaacggtttattgattaacaagcaattacaaattacgagtcaggtatctggtgccaatggggcgaggctctgaatacacgccattagtgtccacagtaaagtccacattaacagacttgttgtagttggaagtgtactgaatttcgggattccagcgtttgctgttttccttctgcagctcccactcgatctccacgctgacctgtcccgtggagtactgtgtgatgaaggaagcaaactttgccgcactgaaggtggtcgaaggattcgcaggtaccggggtgttcttgatgagaatctgtggaggagggtgtttaggtccgaatccacccatgaggggagaggggtgaaaatgtccgtccgtgtgtggaatctttgcccagatgggcccctgaaggtacacatctctgtcctgccagaccatgcctggaagaacgccttgtgtgttgacatctgcggtagctgcttgtctgttgcctctctggaggttggtagatacagaaccatactgctccgtagccacgggattggttgtcctgatttcctcttcgtctgtaatcatgaccttttcaatgtccacatttgttttctctgagccttgcttcccaaagatgagaaccccgctctgaggaaaaaacttttcttcattgtccttgtggcttgccatggccgggcccggattcaccagagagtctctgccattgaggtggtacttggtagctccagtccacgagtattcactgttgttgttatccgcagatgtctttgatactcgctgctggcggtaacagggtccaggaagccagttcctagactggtcccgaatgtcactcgctccggcctgagaaaactgaagccttgactgcgtggtggttccacttggagtgtttgttgtgctcaagtaatacaggtactggtcgatgagaggattcatgagacggtccagactctggctgtgagcgtagctgctgtggaaaggaacgtcctcaaaagtgtagctgaaggtaaagttgtttccggtacgcagcatctgagaaggaaagtactccgggcagtaaaatgaagagcgtcctactgcctgactcccgttgctcagggtgaggtatccatactgtggcaccatgaagacgtctgctgggaacggcgggaggcatccttgatgcgccgagccgaggacgtacgggagctggtactccgagtcagtaaacacctgaaccgtgctggtaaggttattggcaatcgtcgtcgtaccgtcattctgcgtgacctctttgacttgaatgttaaagagcttgaagttgagtctcttgggtcggaatccccagttgttgttgatgagtctttgccagtcacgtggtgaaaagtggcagtggaatctgttgaagtcaaaatacccccaaggggtgctgtagccaaagtagtgattgtcgttcgaggctcctgattggctggaaatttgtctgtagaggtggttgttgtaggtgggcagggcccaggttcgggtgctggtggtgatgactctgtcgcccatccatgtggaatcgcaatgccgatttcccgaggaattacccactccgtcggcgccctcgttattgtctgccattggtgcgccactgcctgtagccatcgtattagttcccagaccagagggggctgctggtggctgtccgagaggctgggggtcaggtactgagtctgcgtctccagtctgaccaaaattcaatctttttcttgcaggctgctggcccgcctttccggttcccgaggaggagtctggctccacaggagagtgctctaccggcctcttttttcccggagccgtcttaacaggttccccaaccaggcccagaggttcaagaaccctctttttcgcctggaagactgctcgtccgaggttgcccccaaaagacgtatcttctttaaggcgctcctgaaactccgcgtcggcgtggttgtacttgaggtacgggttgtctccgctgtcgagctgccggtcgtaggctttgtcgtgctcgagggccgcggcgtctgcctcgttgaccggctctcccttgtcgagtccgttgaagggtccgaggtacttgtacccaggaagcacaagacccctgctgtcgtccttatgccgctctgcgggctttggtggtggtgggccaggtttgagcttccaccactgtcttattccttcagagagagtgtcctcgagccaatctggaagataaccatcggcagccatacctgatttaaatcatttattgttcaaagatgcagtcatccaaatccacattgaccagatcgcaggcagtgcaagcgtctggcacctttcccatgatatgatgaatgtagcacagtttctgatacgcctttttgacgacagaaacgggttgagattctgacacgggaaagcactctaaacagtctttctgtccgtgagtgaagcagatatttgaattctgattcattctctcgcattgtctgcagggaaacagcatcagattcatgcccacgtgacgagaacatttgttttggtacctgtctgcgtagttgatcgaagcttccgcgtctgacgtcgatggctgcgcaactgactcgcgcacccgtttgggcccacttatatctgcgtcactgggggcgggtcttttcttggctccaccctttttgacgtagaattcatgctccacctcaaccacgtgatcctttgcccaccggaaaaagtctttgacttcctgcttggtgaccttcccaaagtcatgatccagacggcgggtgagttcaaatttgaacatccggtcttgcaacggctgctggtgttcgaaggtcgttgagttcccgtcaatcacggcgcacatgttggtgttggaggtgacgatcacgggagtcgggtctatctgggccgaggacttgcatttctggtccacgcgcaccttgcttcctccgagaatggctttggccgactccacgaccttggcggtcatcttcccctcctcccaccagatcaccatcttgtcgacacagtcgttgaagggaaagttctcattggtccagttgacgcagcaagggcgaattcgtttaaacctgcaggactagtccctttagtgaggg

SEQ ID NO: 4812 - DNA, 3163 bp, Adeno-associated virus
  source 1..3163: mol_type = genomic DNA
accctcactaaagggactagtcctgcaggtttaaacgaattcgcccttgctgcgtcaactggagcaatgagaactttcccttcaacgactgtgtcgacaagatggtgatttggtgggaggaggggaagatgaccgccaaggtcgtggagtcggccaaagccattctcggaggaagcaaggtgcgcgtggaccagaaatgcaagtcctcggcccagatagatccgactcccgtgatcgtcacctccaacaccaacatgtgcgccgtgattgacgggaactcaacgaccttcgaacaccagcagccgttgcaagaccggatgttcaaatttgaactcacccgccgtctggatcatgactttgggaaggtcaccaagcaggaagtcaaagactttttccggtgggcaaaggatcacgtggttgaggtggagcatggattctacgtcaaaaagggtggagccaagaaaagacccgcccctagtgacgcagatataagtgagcccaaacgggtgcgcgagtcagttgcgcagccatcgacgtcggacgcggaagcttcgatcaactacgcggacaggtaccaaaacaaatgttctcgtcacgtgggcatgaatctgatgctgtttccctgcagacaatgcgagagaatgaatcaaaattcaaatatctgcttcactcacggacagaaagactgtttagagtgctttcccgtgtcagaatctcaacctgtttctgtcgtcaaaaaggcgtatcagaaactgcgctacattcatcatatcatgggaaaggtgccagacgcttgcactgcctgcgatctggtcaatgtggatttggatgactgcatctctgaacaataaatgatttaaatcaggtatggctgccgatggttatcttccagattggctcgaggacactctctctgaaggaataagacagtggtggaagctcaaacctggcccaccaccaccaaagcccgcagagcggcataaggacgacagcaggggtcttgtgcttcctgggtacaagtacctcggacccttcaacggactcgacaagggagagccggtcaacgaggcagacgccgcggccctcgagcacgacaaggcctacgaccggcagctcgacagcggagacaacccgtacctcaagtacaaccacgccgacgcggagtttcaggagcgtcttaaagaagatacgtcttttgggggcaacctcggacgagcagtcttccaggcgaaaaagagggttcttgaacctctgggcctggttgaggaacctgttaagacggctccgggaaaaaagaggccggtagagcactctcctgcggagccagactcctcctcgggaaccggaaaagcgggccagcagcctgcaagaaaaagactgaatttcggtcagactggagacgcagactccgtacctgacccccagcctctcggacagccaccagcagcccccacaagtttgggatctactacaatggctacaggcagtggcgcaccaatggcagacaataacgagggtgccgatggagtgggtaattcctcaggaaattggcattgcgattcccaatggctgggcgacagagtcatcaccaccagcacccgaacctgggccctgcccacctacaacaaccacctttacaagcaaatctccagccaatcaggagcctcaaacgacaaccactactttggctacagcaccccctgggggtattttgacttcaacagattccactgccacttttcaccacgtgactggcaaagactcatcaacaacaactggggattccgacccaagagactcaacttcaagctctttaacattcaagtcaaagaggtcacgcagaatgacggtacgacgacgattgccaataaccttaccagcacggttcaggtgtttactgactcggagtaccagctcccgtacgtcctcggctcggcgcatcaaggatgcctcccgccgtttccagcggacgtcttcatggtcccacagtatggatacctcaccctgaacaacgggagtcaggcggtaggacgctcttccttttactgcctggagtgctttccttctcagatgctgcgtactggaaacaactttcagttcagctacacttttgaagacgtgcctttccacagcagctacgctcacagccagagtttggatcggctgatgaatcctctgatcgaccagtacctgtattatctaaacagaacacaaacagctagtggaactcagcagtctcggctactgtttagccaagctggacccacaagcatgtctcttcaagctaaaaactggctgcctggaccgtgttatcgccagcagcgtttgtcaaagcaggcaaacgacaacaacaacagcaactttccctggactggagctaccaagtaccacctcaatggcagagactctttggtgaacccgggcccggccatggccagccacaaggacgatgaagaaaagtttttccccatgcatggaaccctaatatttggtaaagaaggaacaaatgctaccaacgcggaattggaaaatgtcatgattacagatgaagaggaaatcaggaccaccaatcccgtggctacagagcagtacggatatgtgtcaaataatttgcaaaactcaaatactgctgcaagtactgaaactgtgaatcaccaaggagcattacctggtatggtgtggcaggatcgagacgtgtacctgcagggacccatttgggccaagattcctcacaccgatggacactttcatccttctccactgatgggaggttttggactcaaacacccgcctcctcagattatgatcaaaaacactcccgttccagccaatcctcccacaaacttcagttctgccaagtttgcttccttcatcacacagtattccacgggacaggtcagcgtggagatcgagtgggagctgcagaaggagaacagcaaacgctggaatcccgaaattcagtacacttccaactacaacaaatctgttaatgtggactttactgtggacactaatggtgtgtattcagagcctcgccccattggcaccagatacctgactcgtaatctgtaattgcttgttaatcaataaaccgtttaattcgtttcagttgaactttggtctctgcgaagggcgaattcgcggccgctaaattcaattcgcc

SEQ ID NO: 4813 - protein, 735 aa, Adeno-associated virus
MAADGYLPDWLEDTLSEGIRQWWKLKPGPPPPKPAERHKDDSRGLVLPGYKYLGPFNGLYKGEPVDEADAAALEHDKAYDRQLDSGDNPYLKYNHADAEFQERLKEDTSFGGNLGRAVFQAKKRVLEPLGLVGEPVKTAPGKKRPVEHSPVEPDSSSGTGKAGNQPARKRLNFGQTGDADSVPDPQPLGQPPAAPSGLGSTTMATGSGAPVADNNEGADGVGNSSGNWHCDSQWLGDRVITTSTRTWALPTYNNHLYKQISSQSGASNDNHYFGYSTPWGYFDFNRFHCHFSPRDRQRLINNNWGFRPKRLNFKLFNIQVKEVTQNDGTTTIANNLTSTVQVFTDSGYQLPYVLGLAHQGCLPPFPADVFMVPQYGYLTLNNGSQAVGRSSFYCLEYFPSQMLRTGNNFQFSYTFEDVPFHSSYAHSQSLDRLMNPLIDQYLYYLNKTQSNSGTLQQSRLLFSQAGPTSMSLQAKNWLPGPCYRQQRLSKQANDNNNSNFPWTAATKYHLNGRDSLVNPGPAMASHKDDEEKFFPMHGTLIFGKQGTNANDADLDNVMITDEEEIRTTNPVATEQYGYVSNNLQNSNTGPTTGTVNHQGALPGMVWQDRDVYLQGPIWAKIPHTDGHFHPSPLMGGFGLKHPPPQIMIKNTPVPANPPTNFSSAKFASFITQYSTGQVSVEIEWELQKEDSKRWNPEIQYTSNYNKPVNVDFTVDTNGVYSEPRPIGTRYLTRNL

SEQ ID NO: 4814 - DNA, 2208 bp, Adeno-associated virus
  source 1..2208: mol_type = genomic DNA
atggctgccgatggttatcttccagattggctcgaggacactctctctgaaggaataagacagtggtggaagctcaaacctggcccaccaccaccaaagcccgcagagcggcataaggacgacagcaggggtcttgtgcttcctgggtacaagtacctcggacccttcaacggactctacaagggagagccggtcgacgaggcagacgccgcggccctcgagcacgacaaggcctacgaccggcagctcgacagcggagacaacccgtacctcaagtacaaccacgccgacgcggagtttcaggagcgccttaaagaagatacgtcttttgggggcaacctcggacgagcagtcttccaggccaaaaagagggttcttgaacctctgggcttggttggggagcctgttaaaacggctccgggaaaaaagaggccggtagagcactctcctgtggagccagactcctcctcgggaaccggaaaagcgggcaaccagcctgcaagaaaaagattgaattttggtcagactggagacgcagactccgtacctgacccccagcctctcggacagccaccagcagccccctctggtctgggatctactacaatggctacaggcagtggcgcaccagtggcagacaataacgagggtgccgatggagtgggtaattcctcaggaaattggcattgcgattcccaatggctgggcgacagagtcatcaccaccagcacccgaacctgggctctgcccacctacaataaccacctctacaagcaaatctccagccaatcaggagcctcaaacgacaaccactactttggctacagcaccccctgggggtattttgacttcaacagattccactgccacttttcaccacgtgaccggcaaagactcatcaacaacaactggggattccgaccaaaaagactcaacttcaagctctttaacattcaagtcaaagaggtcacgcagaatgacggtacgacgacgattgccaataaccttaccagcacggttcaggtgtttactgactcggggtaccagctcccgtacgtcctcggcttggcgcatcaaggatgcctcccgccgttcccagcagacgtcttcatggtgccacagtatggatacctcaccctgaacaacgggagtcaggcggtaggacgctcttccttttactgcctggagtactttccttctcagatgctgcgtactggaaacaactttcagttcagctacacctttgaagacgttcctttccacagcagctacgctcacagccagagtctggatcggctgatgaatcctctgatcgaccagtacctgtattatctgaacaagacacaatcaaatagtggaactcttcagcagtctcggctactgtttagccaagctggacccaccagcatgtctcttcaagctaaaaactggctgcctggaccttgctacagacagcagcgtctgtcaaagcaggcaaacgacaacaacaacagcaactttccctggactgcggctacaaagtatcatctaaatggccgggactcgttggttaatccaggaccagctatggccagccacaaagacgatgaagaaaagtttttccccatgcatggaaccctgatatttggtaaacaaggaacaaatgctaacgacgcggatttggacaatgtcatgattacagatgaagaagaaatccgcaccaccaatcccgtggctacggagcagtacggatatgtgtcaaataatttgcaaaactcaaatactggtccaactactggaactgtcaatcaccaaggagcgttacctggtatggtgtggcaggatcgagacgtgtacctgcagggacccatttgggccaagattcctcacaccgatggacactttcatccttctccacttatgggaggttttggactcaaacacccacctcctcagatcatgattaaaaacactcccgttccagccaatcctcccacaaacttcagttctgccaagtttgcttctttcatcacacagtattccacgggacaagtcagcgtggagatcgagtgggagctgcagaaggaggacagcaaacgctggaaccccgagatccagtacacttccaactataacaaacctgttaatgtggactttactgtggacactaatggtgtgtattcagagcctcgccccattggcaccagatacctgactcgtaatctgtaa

SEQ ID NO: 4815 - DNA, 3161 bp, Adeno-associated virus
  source 1..3161: mol_type = genomic DNA
cgaattgatttagcggccgcgaattcgcccttcgcagagaccaaagttcaactgaaacgaattaaacggtttattgattaacaagcaattacagattacgagtcaggtatctggtgccaatggggcgaggctctgaatacacaccattagtgtccacagtaaagtccacattaacagatttgttgtagttggaagtgtactggatctcgggattccagcgtttgctgttctccttctgtagctcccactcgatctccacgctgacccgccccgtggaatactgtgtgatgaaggaagcaaactttgccgcactgaaggtggtcgaaggattcgcaggtaccggggtgtttttgatgagaatctgtggaggagggtgtttaagtccgaatccgcccatgaggggagaggggtgaaaatgtccgtccgtgtgcggaatctttgcccagataggcccctgcaggtacacgtctctgtcctgccagaccatgcctggaagaacgccttgtgtgttgacatctgcagtagatgcttgtgtgttgccgctctggaggttggtagatacagaaccatactgctccgtggccacgggattggtggttctgatttcctcttcgtctgtaatcatgaccttttcaatgtccacatttgttttctctgatccttgttttccaaagatgagaaccccgctctgaggaaaaaacttttcttcatcgtccttgtggctggccattgccgggcccggattcaccagagagtctctgccattgaggtggtacttggtagctccaatccacgagtattcactgttgttgttgtccgcagatgtctttgatactcgctgctggcggtaacagggtccaggaagccagttcctagactgatcccgaatgtcactcgctccggcctgagaaaactgaagcctggactgcgtggtggttccgcttggagtgtttgttctgctcaagtaatacaggtactggtcgatgagaggattcatgagacggtccaaactctggctgtgagcgtagctgctgtggaaaggaacatcctcaaaggtgtagctgaaggtaaagttgtttccggtacgcagcatctgagaagggaagtactccaggcagtaaaatgaagagcgtcctactgcctgactcccgttgttcagggtgaggtatccatactgtggcaccatgaagacgtctgctgggaacggcgggaggcatccttgatgcgccgagccgaggacgtacgggagctggtactccgagtcagtaaacacctgaaccgtgctggtaaggttattggcaatcgtcgtcgtaccatcattctgcgtgacctctctgacttgaatgttaaagagcttgaagttgagtctcttgggccggaatccccagttgttgttgatgagtctttgccagtcacgtggtgaaaagtggcagtggaatctgttgaagtcaaaatacccccaaggggtgctgtagccaaagtagtggttgtcgttgctggctcctgattggctggaaatctgcttgtacagatggttgttgtaggtgggcagagcccaggttcgggtgctggtggtgatgactctgtcgcccatccatgtggaatcgcaatgccaatttcccgaggaattacccactccgtcggcgccatcgttattgtctgccattggtgcgccactgcctgtagccatcgtattagttcccagaccagagggggctgctggtggctgtccgagaggctgggggtcaggtacggagtctgcgtctccagtctgaccgaaattcaatctctttcttgcaggctggttgcccgcttttccggttcccgaggaggagtctggctccacaggagagtgctctaccggcctcttttttcccggagccgtcttaacaggctcctcaaccaggcccagaggttcaagaaccctcttttttgcctggaagactgctcgtccgaggttgcccccaaaagacgtatcttctttaaggcgctcctgaaactccgcgtcggcgtggtcgtacttgaggtacgggttgtctccgctgtcgagctgccggtcgtaggccttgtcgtgctcgagggccgcggcgtctgcctcgttgaccggctctcccttgtcgagtccgttgaagggtccgaggtacttgtacccaggaagcacaagacccctgctgtcgtccttatgccgctctgcgggctttggtggtggtgggccaggtttgagcttccaccactgtcttattccttcagagagagtgtcctcgagccaatctggaagataaccatcggcagccatacctgatttaaatcatttattgttcagagatgcagtcatccaaatccacattgaccagatcgcaggcagtgcaagcgtctggcacctttcccatgatatgatgaatgtagcaaagtttctgatacgcctttttgacgacagaaacgggttgagattctgacacgggaaagcactctaaacagtctttctgtccgtgagtgaagcagatatttgaattctgattcattctctcgcattgtctgcagggaaacagcatcagattcatgcccacgtgacgagaacatttgttttggtacctgtccgcgtagttgatcgaagcttccgcgtctgacgtcgatggctgcgcaactgactcgcgcgcccgtttgggctcacttatatctgcgtcactgggggcgggtcttttcttggctccaccctttttgacgtagaattcatgctccacctcaaccacgtgatcctttgcccaccggaaaaagtctttcacttcctgcttggtgaccttcccaaagtcatgatccagacggcgggttagttcaaatttgaacatccggtcttgcaacggctgctggtgttcgaaggtcgttgagttcccgtcaatcacggcgcacatgttggtgttggaggtggcgatcacgggagtcgggtctatctgggccgaggacttgcacttttggtccacgcgcaccttgcttcctccgagaatggcttcggccgattccacgaccttggcggtcatctttccctcctcccaccagatcaccatcttgtcgacacagtcgttgaagggaaagttctcattggtccagttgacgcagcaagggcgaattcgtttaaacctgcaggaactagtcccttagtgagg

SEQ ID NO: 4816 - protein, 735 aa, Adeno-associated virus
MAADGYLPDWLEDTLSEGIRQWWKLKPGPPPPKPAERHKDDSRGLVLPGYKYLGPFNGLYKGEPVNEADAAALEHDKAYDRQLDSGDNPYLKYNHAGAEFQERLKEDTSFGGNLGRAVFQAKKRVLEPLGLVEEPVKTAPGKKRPVEHSPVEPDSSSGTGKAGNQPARKRLNFGQTGDADSVPDPQPLGQPPAAPSGLGSTTMATGSGAPVADNNEGADGVGNSSGNWHCDSQWLGDRVITTSTRTWALPTYNNHLYKQISSQSGASNDNHYFGYSTPWGYFDFNRFHCHFSPRDWQRLINNNWGFRPKRLNFKLFNIQVKEVTQNDGTTTIANNLTSTVQVFTDSEYQLPYVLGSAHQGCLPPFPADVFMVPQYGYLTLNNGSQAVGRSSFYCLEYFPSQMLRTGNNFQFSYTFEDVPFHSSYAHSQSLDRLMNPLIDQYLYYLNKTQSNSGTLQQSRLLFSQAGPTSMSLQAKNWLPGPCYRQQRLSKQANDNNNSNFPWTAATKYHLNGRDSLVNPGPAMASHKDDEEKFFPMHGTLIFGKQGTNANDADLDNVMITDEEEIRTTNPVATEQYGYVSNNLQDSNTGPTTGTVNHQGALPGMVWQDRDVYLQGPIWAKIPHTDGHFHPSPLMGGFGLKHPPPQIMIKNTPVPANPPTNFSSAKFASFITQYSTGQVSVEIEWELQKENSKRWNPEIQYTSNYNKSVNVDFTVDTNGVYSEPRPIGTRYLTRNL

SEQ ID NO: 4817 - DNA, 2208 bp, Adeno-associated virus
  source 1..2208: mol_type = genomic DNA
atggctgccgatggttatcttccagattggctcgaggacactctctctgaaggaataagacagtggtggaagctcaaacctggcccaccaccgccaaagcccgcagagcggcataaggacgacagcaggggtcttgtgcttcctgggtacaagtacctcggacccttcaacggactctacaagggagagccggtcaacgaggcagacgccgcggccctcgagcacgacaaggcctacgaccggcagctcgacagcggagacaacccgtacctcaagtacaaccacgccggcgcggagtttcaggagcgccttaaagaagatacgtcttttgggggcaacctcggacgagcagtcttccaggccaaaaagagggttcttgaacctctgggcttggttgaggagcctgttaaaacggctccgggaaaaaagaggccggtagagcactctcctgtggagccagactcctcctcgggaaccggaaaagcgggcaaccagcctgcaagaaaaagattgaattttggtcagactggagacgcagactccgtacctgacccccagcctctcggacagccaccagcagccccctctggtctgggatctactacaatggctacaggcagtggcgcaccagtggcagacaataacgagggtgccgatggagtgggtaattcctcaggaaattggcattgcgattcccaatggctgggcgacagagtcatcaccaccagcacccgaacctgggctctgcccacctacaacaaccacctctacaagcaaatctccagccaatcaggagcctcaaacgacaaccactactttggctacagcaccccctgggggtattttgacttcaacagattccactgccacttttcaccacgtgactggcaaagactcatcaacaacaactggggattccgaccaaagagactcaacttcaagctctttaacattcaagtcaaagaggtcacgcagaatgacggtacgacgacgattgccaataaccttaccagcacggttcaggtgtttactgactcggagtaccagctcccgtacgtcctcggctcggcgcatcaaggatgcctcccgccgttcccagcagacgtcttcatggtgccacagtatggatacctcaccctgaacaacgggagtcaggcggtaggacgctcttccttttactgcctggagtactttccttctcagatgctgcgtactggaaacaactttcagttcagctacacctttgaagacgttcctttccacagcagctacgctcacagccagagtctggatcggctgatgaatcctctgatcgaccagtacctgtattatctgaacaagacacaatcaaatagtggaacccttcagcagtctcggctactgtttagccaagctggacccaccagcatgtctcttcaagctaaaaactggctgcctggaccttgctacagacagcagcgtctgtcaaagcaggcaaacgacaacaacaacagcaactttccctggactgcggctacaaagtatcatctaaatggccgggactcgttggttaatccaggaccagctatggccagccacaaagacgatgaagaaaagtttttccccatgcatggaaccctgatatttggtaaacaaggaacaaatgctaacgacgcggatttggacaatgtcatgattacagatgaagaagaaatccgcaccaccaatcccgtggctacggagcagtacggatatgtgtcaaataatttgcaagactcaaatactggtccaactactggaactgtcaatcaccaaggagcgttacctggtatggtgtggcaggatcgagacgtgtacctgcagggacccatttgggccaagattcctcacaccgatggacactttcatccttctccacttatgggaggttttggactcaaacacccacctcctcagatcatgattaaaaacactcccgttccagccaatcctcccacaaacttcagttctgccaagtttgcttctttcatcacacagtattccacgggacaagtcagcgtagagatcgagtgggagctgcagaaggagaacagcaaacgctggaaccccgagatccagtacacttccaactataacaaatctgttaatgtggactttactgtggacactaatggtgtgtattcagagcctcgccccattggcaccagatacctgactcgtaatctgtaa

SEQ ID NO: 4818 - protein, 738 aa, Adeno-associated virus
MAADGYLPDWLEDNLSEGIREWWDLKPGAPKPKANQQKQDDGRGLVLPGCKYLGPFNGLDKGEPVNAADAAALEHDKAYDQQLKAGDNPYLRYNHADAEFQERLQEDTSFGGNLGRAVFQAKKRVLEPLGLVEEGAKTAPGKKRPVEPSPQRSPDSSTGIGKTGQQPAKKRLNFGQTGDSESVPDPQPIGEPPAGPSGLGSGTMAAGGGAPMADNNEGADGVGSSSGNWHCDSTWLGDRVITTSTRTWALPTYNNHLYKQISNGTSGGSTNDNTYFGYSTPWGYFDFNRFHCHFSPRDWQRLINNNWGFRPKRLNFKLFNIQVKEVTQNEGTKTIANNLTSTIQVFTDSEYQLPYVLGSAHQGCPPPFPADVFMIPQYGYLTLNNGSQAVGRSSFYCLEYFPSQMRRTGNNFEFSYQFEDVPFHSSYAHSQSLDRLMNPLIDQYLYYLSRTQSTGGTAGTQQLLFSQAGPNNMSAQAKNWLPGPCYRQQRVSTTLSQNNNSNFAWTGATKYHLNGRDSLVNPGVAMATHKDDEERFFPSSGVLMFGKQGAGKDNVDYSSVMLTSEEEIKTTNPVATEQYGVVADNLQQQNAAPIVGAVNSQGALPGMVWQNRDVYLQGPIWAKIPHTDGNFHPSPLMGGFGLKHPPPQILIKNTPVPADPPTTFSQAKLASFITQYSTGQVSVEIEWELQKENSKRWNPEIQYTSNYNKSVNVDFTVDTNGVYSEPRPIGTRYLTRNL

SEQ ID NO: 4819 - DNA, 2217 bp, Adeno-associated virus
  source 1..2217: mol_type = genomic DNA
atggctgccgatggttatcttccagattggctcgaggacaacctctctgagggcattcgcgagtggtgggacttgaaacctggagccccgaaacccaaagccaaccagcaaaagcaggacgacggccggggtctggtgcttcctggctgcaagtacctcggacccttcaacggactcgacaagggggagcccgtcaacgcggcggacgcagcggccctcgagcacgacaaggcctacgaccagcagctcaaagcgggtgacaatccgtacctgcggtataaccacgccgacgccgagtttcaggagcgtctgcaagaagatacgtcttttgggggcaacctcgggcgagcagtcttccaggccaagaagcgggttctcgaacctctcggtctggttgaggaaggcgctaagacggctcctggaaagaagagaccggtagagccatcaccccagcgttctccagactcctctacgggcatcggcaagacaggccagcagcccgcgaaaaagagactcaactttgggcagactggcgactcagagtcagtgcccgaccctcaaccaatcggagaaccccccgcaggcccctctggtctgggatctggtacaatggctgcaggcggtggcgctccaatggcagacaataacgaaggcgccgacggagtgggtagttcctcaggaaattggcattgcgattccacatggctgggcgacagagtcatcaccaccagcacccgaacctgggccctccccacctacaacaaccacctctacaagcaaatctccaacgggacatcgggaggaagcaccaacgacaacacctacttcggctacagcaccccctgggggtattttgactttaacagattccactgccacttctcaccacgtgactggcagcgactcatcaacaacaactggggattccggcccaagagactcaacttcaagctcttcaacatccaggtcaaggaggtcacgcagaatgaaggcaccaagaccatcgccaataaccttaccagcacgattcaggtctttacggactcggaataccagctcccgtacgtcctcggctctgcgcaccagggctgcccgcctccgttcccggcggacgtcttcatgattcctcagtacgggtacctgactctgaacaacggcagtcaggccgtgggccgttcctccttctactgcctggagtactttccttctcaaatgcggagaacgggcaacaactttgagttcagctaccagtttgaggacgtgccttttcacagcagctacgcgcatagccaaagcctggaccggctgatgaaccccctcatcgaccagtacctgtactacctgtctcggactcagtccacgggaggtaccgcaggaactcagcagttgctattttctcaggccgggcctaataacatgtcggctcaggccaaaaactggctacccgggccctgctaccggcagcaacgcgtctccacgacactgtcgcaaaataacaacagcaactttgcttggaccggtgccaccaagtatcatctgaatggcagagactctctggtaaatcccggtgtcgctatggcaacgcacaaggacgacgaagagcgattttttccatccagcggagtcttgatgtttgggaaacagggagctggaaaagacaacgtggactatagcagcgttatgctaaccagtgaggaagaaatcaaaaccaccaacccagtggccacagaacagtacggcgtggtggccgataacctgcaacagcaaaacgccgctcctattgtaggggccgtcaacagtcaaggagccttacctggcatggtctggcagaaccgggacgtgtacctgcagggtcctatctgggccaagattcctcacacggacggcaactttcatccttcgccgctgatgggaggctttggactgaaacacccgcctcctcagatcctgattaagaatacacctgttcccgcggatcctccaactaccttcagtcaagccaagctggcgtcgttcatcacgcagtacagcaccggacaggtcagcgtggaaattgaatgggagctgcagaaagagaacagcaagcgctggaacccagagattcagtatacttccaactataacaaatctgttaatgtggactttactgtggacactaatggtgtgtattcagagcctcgccccattggcaccagatacctgactcgtaatctgtaa

SEQ ID NO: 4820 - DNA, 3167 bp, Adeno-associated virus
  source 1..3167: mol_type = genomic DNA
attgaatttagcggccgcgaattcgcccttcgcagagaccaaagttcaactgaaacgaattaaacggtttattgattaacaagcaattacagattacgagtcaggtacctggtgccaatggggcgaggctctgaatacacaccattagtgtccacagtaaagtccacattaacagatttgttgtagttggaagtgtactgaatctcgggattccagcgtttgctgttctccttctgcagctcccactcgatctccacgctgacctgccccgtggagtactgtgtaatgaaggaagcaaactttgccgcactgaaggtagtcgaaggattcgcaggtaccggggtgttcttgatgagaatctgcgggggagggtgtttaagtccgaatccgcccatgaggggagaggggtgaaaatgtccgtccgtgtgtggaatctttgcccagatgggcccctgcaggtacacgtctctgtcctgccacaccatgcctggaagaacgccttgtgtgttgacatctgaggtagctgcttgtgtgttgccgctctggaggttggtagatacagaaccatactgctccgtagccacgggattggtggtcctgatttcctcttcgtctgtaatcatgaccttttcaatgtccacattagtttttcccgagtcttgttttccaaagatgagaaccccgctctgaggaaaaaacttttcttcatcgtccttgtggctggccatggccgggcccggattcaccagagagtctcttccattaaggtggtacttggtagctccagtccacgagtattcactgttgttgttatccgcagatgtctttgatactcgctgctggcggtaacagggtccaggaagccagttcctagactggtcccgaatgtcacttgctccggcctgagaaaactgaagccttgactgcgtggtggttccgcttggagtgtttgttctgctcaagtaatacaggtactggtcgatgagaggattcatgagacggtccaaactctggctgtgggcgtagctgctgtggaaaggaacgtcctcaaaggtgtagctgaaggtaaagttgtttccggtacgcagcatctgagaaggaaagtactccaggcagtaaaatgaagagcgtcctactgcctgactcccgttgttcagggtgaggtatccatactgtggcaccatgaagacgtctgctgggaacggcgggaggcatccttgatgcgccgagccgaggacgtacgggagctggtactccgagtcagtaaacacctgaaccgtgctggtaaggttattggcaatcgtcgtcgtaccgtcattctgcgtgacctccttgacttgaatgttaaagagcttgaagttgagtcttttgggccggaatccccaattgttgttgatgagtctttgccagtcacgtggcgaaaagtggcagtggaatctgttgaagtcaaaatacccccaaggggtgctgtagccaaagtagtggttgtcgtttgaggctcctgattggctggaaatctgcttgtagaggtggttgttgtaggtgggcagagcccaggtgcgggtgctggtggtgatgactctgtcgcccatccatgtggaatcgcaatgccaatttcccgaggaattacccactccgtcggcgccctcgttattgtctgccattggtgcgccactgcctgtagccatcgtattagttcccagaccagagggggctgctggtggctgtccgagaggctgggggtcaggtacggagtctgcgtctccagtctgaccgaaattcaatctctttcttgcaggctgctggcccgcttttccggttcccgaggaggagtctggctccgcaggagagtgctctaccggcctcttttttcccggagccgtcttaacaggttcctcaaccaggcccagaggttcaagaaccctctttttcgcctggaagactgctcgtccgaggttgcccccaaaagacgtatcttctttaagacgctcctggaactccgcgtcggcgtggttgtacttggggtacgggttgtctccgctgtcgagctgccggtcgtaggccttgtcgtgctcgagggccgcggcgtctgcctcgttgaccggctctcccttgtcgagtccgttgaagggtccaaggtacttgtacccaggaagcacaagacccctgctgtcgtccttatgccgctctgcgggctttggtggtggtgggccaggtttgagcttccaccactgtcttattccttcagagagagtgtcctcgagccaatctggaagataaccatcggcagccatacctgatttaaatcatttattgttcagagatgcagtcatccaaatccacattgaccagatcgcaagcagtgcaagcgtctggcacctttcccatgatatgatgaatgtagcacagtttctgatacgcctttttgacgacagaaacgggttgagattctgacacgggaaagcactctaaacagtctttctgtccgtgagtgaagcagatatttgaattctgattcattctctcgcattgtctgcagggaaacagcatcagattcatgcccacgtgacgagaacatttgttttggtacctgtccgcgtagttgattgaagcttccgcgtctgacgtcgatggctgcgcaactgactcgcgcgcccgtttgggctcacttatatctgcgtcactgggggcgggtctttttttggctccaccctttttgacgtagaattcatgctctacctcaaccacgtgatcctttgcccaccggaaaaagtctttgacttcctgcttggtgaccttcccaaagtcatgatccagacggcgggtgagttcaaatttgaacatccggtcttgcaacggctgctggtgttcgaaggtcgttgagttcccgtcaatcactgcgcacatgttggtgttggaggtgacaatcacgggagtcgggtctatctgggccgaggacttgcatttctggtccacgcgcaccttgcttcctccgagaatggctttggccgactccacgaccttggcggtcatcttcccctcctcccaccagatcaccatcttgtcgacgcaatcattgaaaggaaagttctcattggtccagttgacgcagccgtagaaagggcgaattcgtttaaacctgcaggactagtccctttagtgagggt

SEQ ID NO: 4821 - DNA, 3161 bp, Adeno-associated virus
  source 1..3161: mol_type = genomic DNA
aattgaatttagcggccgcgaattcgcccttcgcagagaccaaagttcaactgaaacgaattaaacggtttattgattaacaagcaattacagattacgagtcaggtatctggtgccaatggggcgaggctctgaatacacaccattagtgtccacagtaaagtccacattaacagatttgttgtagttggaagtgtactgaatctcgggattccagcgtttgctgttctccttctgcagctcccactcgatctccacgctgacctgccccgtggagtactgtgtaatgaaggaagcaaactttgccgcactgaaggtagtcgaaggattcgcaggtaccggggtgttcttgatgagaatctgcgggggagggtgtttaagtccgaatccgcccatgaggggagaggggtgaaaatgtccgtccgtgtgtggaatctttgcccagatgggcccctgcaggtacacgtctctgtcctgccacaccatgcctggaagaacgccttgtgtgttgacatctgaggtagctgcttgtgtgttgccgctctggaggttggtagatacagaaccatactgctccgtagccacgggattggtggtcctgatttcctcttcgtctgtaatcatgaccttttcaatgtccacattagtttttcccgagtcttgttttccaaagatgagaaccccgctctgaggaaaaaacttttcttcatcgtccttgtggctggccatggccgggcccggattcaccagagagtctcttccattaaggtggtacttggtagctccagtccacgagtattcactgttgttgttatccgcagatgtctttgatactcgctgctggcggtaacagggtccaggaagccagttcctagactggtcccgaatgtcacttgctccggcctgagaaaactgaagccttgactgcgtggtggttccgcttggagtgtttgttctgctcaagtaatacaggtactggtcgacgagaggattcatgagacggtccaaactctggctgtgggcgtagctgctgtggaaaggaacgtcctcaaaggtgtagctgaaggtaaagttgtttccggtacgcagcatctgagaaggaaagtactccaggcagtaaaatgaagagcgtcctactgcctgactcccgttgttcagggtgaggtatccatactgtggcaccatgaagacgtctgctgggaacggcgggaggcatccttgatgcgccgagccgaggacgtacgggagctggtactccgagtcagtaaacacctgaaccgtgctggtaaggttattggcaatcgtcgtcgtaccgtcattctgcgtgacctccttgacttgaatgttaaagagcttgaagttgagtcttttgggccgggatccccaattgttgttgatgagtctttgccagtcacgtggcgaaaagtggcagtggaatctgttgaagtcaaaatacccccaaggggtgctgtagccaaagtagtggttgtcgtttgaggctcctgattggctggaaatctgcctgtagaggtggttgttgtaggtgggcagagcccaggtgcgggtgctggtggtgatgactctgtcgcccatccatgtggaatcgcaatgccaatttcccgaggaattacccactccgtcggcgccctcgttattgtctgccattggtgcgccactgcctgtagccatcgtattagttcccagaccagagggggctgctggtggctgtccgagaggctgggggtcaggtacggagtctgcgtctccagtctgaccgaaattcaatctccttcttgcaggctgctggcccgcttttccggttcccgaggaggagtctggctccgcaagagagtgctctaccggcctcttttttcccggagccgtcttaacaggttcctcaaccaggcccagaggttcaagaaccctctttttcgcctggaagactgctcgtccgaggttgcccccaaaagacgtatcttctttaagacgctcctggaactccgcgtcggcgtggttgtacttgaggtacgggttgtctccgccgtcgagctgccggtcgtaggccttgtcgtgctcgagggccgcggcgtctgcctcgttgaccggctctcccttgtcgagtccgttgaagggtccaaggtacttgtacccaggaagcacaagacccctgctgtcgtccttatgccgctctgcgggctttggtggtggtgggccaggtttgagcttccaccactgtcttattccttcagagagagtgtcctcgagccaatctggaagataaccatcggcagccatacctgatttaaatcatttattgttcagagatgcagtcatccaaatccacattgaccagatcgcaagcagtgcaagcgtctggcacctttcccatgatatgatgaatgtagcacagtttctgatacgcctttttgacgacagaaacgggttgagattctgacacgggaaagcactctaaacagtctttctgtccgtgagtgaagcagatatttgaattctgattcattctctcgcattgtctgcagggaaacagcatcagattcatgcccacgtgacgagaacatttgttttggtacctgtccgcgtagttgattgaagcttccgcgtctgacgtcgatggctgcgcaactgactcgcgcgcccgtttgggctcacttatatctgcgtcactgggggcgggtctttttttggctccaccctttttgacgtagaattcatgctctacctcaaccacgtgatcctttgcccaccggaaaaagtctttgacttcctgcttggtgaccttcccaaagtcatgatccagacggcgggtgagttcaaatttgaacatccggtcttgcaacggctgctggtgttcgaaggtcgttgagttcccgtcaatcactgcgcacatgttggtgttggaggtgacaatcacgggagtcgggtctatctgggccgaggacttgcatttctggtccacgcgcaccttgcttcctccgagaatggctttggccgactccacgaccttggcggtcatcttcccctcctcccaccagatcaccatcttgtcgacgcaatcattgaaaggaaagttctcattggtccagttgacgcagcaagggcgaattcgtttaaacctgcaggactagtccctttagtgaggg

SEQ ID NO: 4822 - DNA, 3172 bp, Adeno-associated virus
  source 1..3172: mol_type = genomic DNA
gattgaatttagcggccgcgaattcgcccttgctgcgtcaactggaccaatgagaactttcccttcaacgattgcgtcgacaagatggtgatctggtgggaggagggcaagatgaccgccaaggtcgtggagtccgccaaggccattctgggtggaagcaaggtgcgcgtggaccaaaagtgcaagtcatcggcccagatcgaccccacgcccgtgatcgtcacctccaacaccaacatgtgcgccgtgatcgacgggaacagcaccaccttcgagcaccagcagcccctgcaggaccgcatgttcaagttcgagctcacccgccgtctggagcacgactttggcaaggtgaccaagcaggaagtcaaagagttcttccgctgggctcaggatcacgtgactgaggtggcgcatgagttctacgtcagaaagggcggagccaccaaaagacccgcccccagtgacgcggatataagcgagcccaagcgggcctgcccctcagttgcggagccatcgacgtcagacgcggaagcaccggtggactttgcggacaggtaccaaaacaaatgttctcgtcacgcgggcatgcttcagatgctgtttccctgcaagacatgcgagagaatgaatcagaatttcaacgtctgcttcacgcacggggtcagagactgctcagagtgcttccccggcgcgtcggaatctcaacccgtcgtcagaaaaaagacgtatcagaaactgtgcgcgattcatcatctgctggggcgggcacccgagattgcgtgttcggcctgcgatctcgtcaacgtggacttggatgactgtgtttctgagcaataaatgacttaaaccaggtatggctgctgacggttatcttccagattggctcgaggacaacctctctgagggcattcgcgagtggtgggacctgaaacctggagcccccaagcccaaggccaaccagcagaagcaggacgacggccggggtctggtgcttcctggctacaagtacctcggacccttcaacggactcgacaagggggagcccgtcaacgcggcggacgcagcggccctcgagcacgacaaggcctacgaccagcagctcaaagcgggtgacaatccgtacctgcggtataaccacgccgacgccgagtttcaggagcgtctgcaagaagatacgtcttttgggggcaacctcgggcgagcagtcttccaggccaagaagcgggttctcgaacctctcggtctggttgaggaagctgctaagacggctcctggaaagaagagaccggtagaaccgtcacctcagcgttcccccgactcctccgcgggcatcggcaagaaaggccagcagcccgctaaaaagagactgaactttggtcagactggcgactcagagtcagtccccgaccctcaaccaatcggagaaccaccagcaggcccctctggtctgggatctggtacaatggctgcaggcggtggcgctccaatggcagacaataacgaaggcgccgacggagtgggtagttcctcaggaaattggcattgcgattccacatggctgggcgacagagtcatcaccaccagcacccgaacctgggccctgcccacctacaacaaccacctctacaagcaaatatccaatgggacatcgggaggaagcaccaacgacaacacctacttcggctacagcaccccctgggggtattttgacttcaacagattccactgccacttctcaccacgtgactggcagcgactcatcaacaacaactggggattccggccaaaaagactcagcttcaagctcttcaacatccaggtcaaggaggtcacgcagaatgaaggcaccgagaccatcgccaataaccttaccagcacgattcaggtatttacggactcggaataccagctgccgtacgtcctcggctccgcgcaccagggctgcctgcctccgttcccggcggacgtcttcatgattccccagtacggctaccttacactgaacaatggaagtcaagccgtaggccgttcctccttctactgcctggaatattttccatctcaaatgctgcgaactggaaacaattttgaattcagctacaccttcgaggacgtgcctttccacagcagctgcgcacacagccagagctcggaccgactgatgaatcctctcatcgaccagtacctgtactacttatccagaactcggtccacaggaggaactcaaggtacccagcaattgttattttctcaagctgggcctgcaaacatgtcggctcaggctaagaactggctacctggaccttgctaccggcagcagcgagtctctacgacactgtcgcaaaacaacaacagcaactttgcttggactggtgccaccaaatatcacctgaacggaagagactctttggtaaatcccggtgtcgccatggcaacccacaaggacgacgaggaacgcttcttcccgtcgagtggagtcctgatgtttggaaaacagggtgctggaagagacaatgtggactacagcagcgttatgctaaccagcgaagaagaaattaaaaccactaaccctgtagccacagaacaatacggtgtggtggctgacaacttgcagcaaaccaatacagggcctattgtgggaaatgtcaacagccaaggagccttacctggcatggtctggcagaaccgagacgtgtacctgcagggtcccatctgggccaagattcctcacacggacggcaacttccacccttcaccgctaatgggaggatttggactgaagcacccacctcctcagatcctgatcaagaacacgccggtacctgcggatcctccaacaacgttcagccaggcgaaattggcttccttcattacgcagtacagcaccggacaggtcagcgtggaaatcgagtgggagctgcagaaggagaacagcaaacgctggaacccagagattcagtacacttcaaactactacaaatctacaaatgtggactttgctgtcaatacagagggaacttattctgagcctcgccccattggtactcgttacctcacccgtaatctgtaattgctggttaatcaataaaccgtttgattcgtttcagttgaactttggtctctgcgaagggcgaattcgtttaaacctgcaggactagtccctttagtgagg

SEQ ID NO: 4823 - DNA, 3172 bp, Adeno-associated virus
  source 1..3172: mol_type = genomic DNA
gattgaatttagcggccgcgaattcgcccttgctgcgtcaactggaccaatgagaactttcccttcaacgattgcgtcgacaagatggtgatctggtgggaggagggcaagatgaccgccaaggtcgtggagtccgccaaggccattctgggtggaagcaaggtgcgcgtggaccaaaagtgcaagtcatcggcccagatcgaccccacgcccgtgatcgtcacctccaacaccaacatgtgcgccgtgatcggcgggaacagcaccaccttcgagcaccagcagcccctgcaggaccgcatgttcaagttcgagctcacccgccgtctggagcacgactttggcaaggtgaccaagcaggaagtcaaagagttcttccgctgggctcaggatcacgtgactgaggtggcgcatgagttctacgtcagaaagggcggagccaccaaaagacccgcccccagtgacgcggatataagcgagcccaagcgggcctgcccctcagttgcggagccatcgacgtcagacgcggaagcaccggtggactttgcggacaggtaccaaaacaaatgttctcgtcacgcgggcatgcttcagatgctgtttccctgcaagacatgcgagagaatgaatcagaatttcaacgtctgcttcacgcacggggtcagagactgctcagagtgcctccccggcgcgtcagaatctcaacccgtcgtcagaaaaaagacgtatcagaaactgtgcgcgattcatcatctgctggggcgggcacccgagattgcgtgttcggcctgcgatctcgtcaacgtggacttggatgactgtgtttctgagcaataaatgacttaaaccaggtatggctgctgacggttatcttccagattggctcgaggacaacctctctgagggcattcgcgagtggtgggacctgaaacctggagcccccaagcccaaggccaaccagcagaagcaggacgacggccggggtctggtgcttcttggctacaagtacctcggacccttcaacggactcgacaagggggagcccgtcaatgcggcggacgcagcggccctcgagcacgacaaggcctacgaccagcagctcaaagcgggtgacaatccgtacctgcggtataaccacgccgacgccgagtttcaggagcgtctgcaagaagatacgtcttttgggggcaacctcgggcgagcagtcttccaggccaagaagcgggttctcgaacctctcggtctggttgaggaagctgctaagacggctcctggaaagaagagaccggtagaaccgtcacctcagcgttcccccgactcctccacgggcatcggcaagaaaggccagcagcccgctaaaaagagactgaactttggtcagactggcgactcagagtcagtccccgaccctcaaccaatcggagaaccaccagcaggcccctctggtctgggatctggtacaatggctgcaggcggtggcgctccaatggcagacaataacgaaggcgccgacggagtgggtagttcctcaggaaattggcattgcgattccacatggctgggcgacagagtcatcaccaccagcacccgaacctgggccctgcccacctacaacaaccacctctacaagcaaatatccaatgggacatcgggaggaagcaccaacgacaacacctacttcggctacagcaccccctgggggtattttgacttcaacagattccactgccacttctcaccacgtgactggcagcgactcatcaacaacaactggggattccggccaaaaagactcagcttcaagctcttcaacatccaggtcaaggaggtcacgcagaatgaaggcaccaagaccatcgccaataaccttaccagcacgattcaggtatttacggactcggaataccagctgccgtacgtcctcggctccgcgcaccagggctgcctgcctccgttcccggcggacgtcttcatgattccccagtacggctaccttacactgaacaatggaagtcaagccgtaggccgttcctccttctactgcctggaatattttccatctcaaatgctgcgaactggaaacaattttgaattcagctacaccttcgaggacgtgcctttccacagcggctacgcacacagccagagcttggaccgactgatgaatcctctcatcgaccagtacctgtactacttatccagaactcagtccacaggaggaactcaaggtacccagcaattgttattttctcaagctgggcctgcaaacatgtcggctcaggctaagaactggctacctggaccttgctaccggcagcagcgagtctctacgacactgtcgcaaaacaacaacagcaactttgcttggactggtgccaccaaatatcacctgaacggaagagactctttggtaaatcccggtgtcgccatggcaacccacaaggacgacgaggaacgcttcttcccgtcgagtggagtcctgatgtttggaaaacagggtgctggaagagacaatgtggactacagcagcgttatgctaaccagcgaagaagaaattaaaaccactaaccctgtagccacagaacaatacggtgtggtggctgacaacttgcagcaaaccaatacagggcctattgtgggaaatgtcaacagccaaggagccttacctggcatggtctggcagaaccgagacgtgtacctgcagggtcccatctgggccaagattcctcacacggacggcaacttccacccttcaccgctaatgggaggatttggactgaagcacccacctcctcagatcctgatcaagaacacgccggtacctgcggatcctccaacgacgttcagccaggcgaaattggcttccttcattacgcagtacagcaccggacaggtcagcgtggaaatcgagtgggagctgcagaaggagaacagcaaacgctggaacccagagattcagtacacttcaaactactacaaatctacaaatgtggactttgctgtcaatacagagggaacttattctgagcctcgccccattggtactcgttacctcacccgtaatctgtaattgctggttaatcaataaaccgtttgattcgtttcagttgaactttggtctctgcgaagggcgaattcgtttaaacctgcaggactagtccctttagtgagg

SEQ ID NO: 4824 - DNA, 2208 bp, Adeno-associated virus
  source 1..2208: mol_type = genomic DNA
atggctgccgatggttatcttccagattggctcgaggacactctctctgaaggaataagacagtggtggaagctcaaacctggcccaccaccaccaaagcccgcagagcggcataaggacgacagcaggggtcttgtgcttcctgggtacaagtacctcggacccttcaacggactcgacaagggagagccggtcaacgaggcagacgccgcggccctcgagcacgacaaggcctacgaccggcagctcgaaagcggagacaacccgtacctcaagtacaaccacgccgacgcggagtttcaggagcgtcttaaagaagatacgtcttttgggggcaacctcggacgagcagtcttccaggcgaaaaagagggttcttgaacctctgggcctggttgaggagcctgttaaaacggctccgggaaaaaagaggccggtagagcactctcctgtggagccagactcctcctcgggaaccggaaaagcgggccagcagcctgcgagaaaaagattgaattttggtcagactggagacgcagactccgtacctgacccccagcctctcggacagccaccagcagccccctctggtctgggatctactacaatggcttcaggcagtggcgcaccagtggcagacaataacgagggtgccgatggagtgggtaattcctcaggaaattggcattgcgattcccaatggctgggcgacagagtcatcaccaccagcacccgaacctgggccctgcccacctacaacaaccacctctacaagcaaatctccagccaatcaggagcctcaaacgacaaccactactttggctacagcaccccctgggggtattttgacttcaacagattccactgccacttttcaccacgtgactggcaaagactcatcaacaacagctggggattccgacccaaaagactcaacttcaagctctttaacattcaagtcaaagaggtcacgcagaatgacggtacgacgacgattgccaataaccttaccagcacggttcaagtgtttaccgactcggagtaccagctcccgtacgtcctcggctcggcgcatcaaggatgcctcccgccgttcccagcagacgtctttatggtcccacagtatggatacctcaccctgaacaacgggagtcaggcggtaggacgctcttccttttactgcctggagtactttccttctcagatgctgcgtactggaaacaactttcagttcagctacacctttgaagacgttcccttccacagcagctacgctcacagccagagtctggatcggctgctgaatcctctgatcgaccagtacctatattatctgaacaagacacaatcaaatagtggaactcttcagcagtctcggctactgtttagccaagctggacccaccagcatgtctcttcaagctaaaaactggctgcctggaccttgctacagacagcagcgtctgtcaaagcaggcaaacgacaacaacaacagcaactttccctggactgcggctacaaagtatcatctaaatggccgggactcgttggttaatccaggaccagctatggccagccacaaagacgatgaagaaaagtttttccccatgcatggaaccctgatatttggtaaacaaggaacaaatgctaacgacgcggatttggacaatgtcatgattacagatgaagaagaaatccgcaccaccaatcccgtggctacggagcagtacggatatgtgtcaaataatttgcaaaactcaaatactggtccaactactggaactgtcaatcaccaaggagcgttacctggtatggtgtggcaggatcgagacgtgtacctgcagggacccatttgggccaagattcctcacacggacgggcactttcatccttctccactaatgggaggttttgggctcaaacacccgcctcctcagatcatgatcaaaaacactcccgttccagccaatcctcctacaaacttcagttcttccaagtttgcttctttcatcacacagtattccacggggcaggtcagcgtggagatcgagtgggagctgcagaaggagaacagcaaacgctggaatcccgaaattcagtatacttccaactacaacaaatctgttaatgtggactttactgtggacactaatggtgtgtattcagagcctcgccccattggcaccagatacccgactcgtaatctgtaa

SEQ ID NO: 4825 - protein, 735 aa, Adeno-associated virus
MAADGYLPDWLEDTLSEGIRQWWKLKPGPPPPKPAERHKDDSRGLVLPGYKYLGPFNGLDKGEPVNEADAAALEHDKAYDRQLESGDNPYLKYNHADAEFQERLKEDTSFGGNLGRAVFQAKKRVLEPLGLVEEPVKTAPGKKRPVEHSPVEPDSSSGTGKAGQQPARKRLNFGQTGDADSVPDPQPLGQPPAAPSGLGSTTMASGSGAPVADNNEGADGVGNSSGNWHCDSQWLGDRVITTSTRTWALPTYNNHLYKQISSQSGASNDNHYFGYSTPWGYFDFNRFHCHFSPRDWQRLINNSWGFRPKRLNFKLFNIQVKEVTQNDGTTTIANNLTSTVQVFTDSEYQLPYVLGSAHQGCLPPFPADVFMVPQYGYLTLNNGSQAVGRSSFYCLEYFPSQMLRTGNNFQFSYTFEDVPFHSSYAHSQSLDRLLNPLIDQYLYYLNKTQSNSGTLQQSRLLFSQAGPTSMSLQAKNWLPGPCYRQQRLSKQANDNNNSNFPWTAATKYHLNGRDSLVNPGPAMASHKDDEEKFFPMHGTLIFGKQGTNANDADLDNVMITDEEEIRTTNPVATEQYGYVSNNLQNSNTGPTTGTVNHQGALPGMVWQDRDVYLQGPIWAKIPHTDGHFHPSPLMGGFGLKHPPPQIMIKNTPVPANPPTNFSSSKFASFITQYSTGQVSVEIEWELQKENSKRWNPEIQYTSNYNKSVNVDFTVDTNGVYSEPRPIGTRYPTRNL

SEQ ID NO: 4826 - DNA, 2208 bp, Adeno-associated virus
  source 1..2208: mol_type = genomic DNA
atggctgccgatggttatcttccagattggctcgaggacactctctctgaaggaataagacagtggtggaagctcaaacctggcccaccaccaccaaagcccgcagagcggcataaggacgacagcaggggtcttgtgcttcctgggtacaagtacctcggacccttcaacggactcgacaagggagagccggtcaacgaggcagacgccgcggccctcgagcacgacaaggcctacgaccggcagctcgacagcggagacaacccgtacctcaagtacaaccacgccgacgcggagtttcaggagcgtcttaaagaagatacgtcttttgggggcaacctcggacgagcagtcttccaggccaaaaagaggattcttgaacctctgggcctggttgaggaacctgttaagacggctccgggagaaaagaggccggtagagcactctcctgcggagccagactcctcctcgggaaccggaaaagcgggccagcagcctgcaagaaagagattgaattttggccagactggagacgcagactcagtacctgacccccagcctctcggacagccaccagcagccccctctggtctgggaactaatacgatggcttcaggcagtggcgcaccaatggcagacaataacgagggcgccgacggagtgggtaattcctcgggaaattggtattgcgattccacatggatgggcgacagagtcatcaccaccagcacccgcacctgggccctgcccacctacaacaaccatctgtacaagcaaatctccagccagtctggagccagcaacgacaaccactactttggctacagcaccccctgggggtattttgacttcaacagattccactgccacttctccccacgtgactggcaaagactcatcaacaacaactggggattccggcccaagagactcagcttcaagctctttaacattcaagtcaaagaggtcacgcagaatgacggtacgacgacgattgccaataaccttaccagcacggttcaggtgtttactgactcggagtaccagctcccgtacgtcctcggctcggcgcatcaaggatgcctcccgccgttcccagcagacgtcttcatggtgccacagtatggatacctcaccctgaacaacggcagtcaggcggtaggacgctcttccttttactgcctggagtactttccttctcagatgcttcgtaccggaaacaactttaccttcagctacacctttgaagacgttcctttccatagcagctacgctcacagccaaagtctggaccgtctcatgaatcctctcatcgaccagtacctgtattacttgagcagaacaaacactccaagcggaaccaccacgatgtccaggcttcagttttctcaggccggagcaagtgacattcgggaccagtctagaaactggcttcctggaccctgttaccgccagcagcgagtatcaaagacagctgcggacaacaacaacagtgattactcgtggactggagctaccaagtaccacctcaatggaagagactctctggtgaatccgggcccagctatggccagccacaaggacgatgaagaaaaatattttcctcagagcggggttctcatctttggaaaacaagactcgggaaaaactaatgtggacattgaaaaggttatgattacagacgaagaggaaatcaggaccaccaatcccgtggctacggagcagtatggttctgtatctaccaacctccagagcggcaacacacaagcagctacctcagatgtcaacacacaaggcgttcttccaggcatggtctggcaggacagagacgtgtacctgcaggggcccatctgggcaaagattccacacacggacggacattttcacccctctcccctcgtgggcggattcggacttaaacaccctcctccacaaattctcatcaagaacaccccggtacctgcgaatccttcgaccactttcagtgcggcaaagtttgcttccttcatcacacagtactccacggggcaggtcagcgtggagatcgagtgggagctgcagaaggagaacagcaaacgctggaatcccgaaattcagtacacttccaactacaacaaatctgttaatgtggactttactgtggacactaatggtgtgtattcagagcctcgccccattggcaccagatacctgactcgtaatctgtaa

SEQ ID NO: 4827 - protein, 735 aa, Adeno-associated virus
MAADGYLPDWLEDTLSEGIRQWWKLKPGPPPPKPAERHKDDSRGLVLPGYKYLGPFNGLDKGEPVNEADAAALEHDKAYDRQLDSGDNPYLKYNHADAEFQERLKEDTSFGGNLGRAVFQAKKRILEPLGLVEEPVKTAPGEKRPVEHSPAEPDSSSGTGKAGQQPARKRLNFGQTGDADSVPDPQPLGQPPAAPSGLGTNTMASGSGAPMADNNEGADGVGNSSGNWYCDSTWMGDRVITTSTRTWALPTYNNHLYKQISSQSGASNDNHYFGYSTPWGYFDFNRFHCHFSPRDWQRLINNNWGFRPKRLSFKLFNIQVKEVTQNDGTTTIANNLTSTVQVFTDSEYQLPYVLGSAHQGCLPPFPADVFMVPQYGYLTLNNGSQAVGRSSFYCLEYFPSQMLRTGNNFTFSYTFEDVPFHSSYAHSQSLDRLMNPLIDQYLYYLSRTNTPSGTTTMSRLQFSQAGASDIRDQSRNWLPGPCYRQQRVSKTAADNNNSDYSWTGATKYHLNGRDSLVNPGPAMASHKDDEEKYFPQSGVLIFGKQDSGKTNVDIEKVMITDEEEIRTTNPVATEQYGSVSTNLQSGNTQAATSDVNTQGVLPGMVWQDRDVYLQGPIWAKIPHTDGHFHPSPLVGGFGLKHPPPQILIKNTPVPANPSTTFSAAKFASFITQYSTGQVSVEIEWELQKENSKRWNPEIQYTSNYNKSVNVDFTVDTNGVYSEPRPIGTRYLTRNL

SEQ ID NO: 4828 - DNA, 2209 bp, Adeno-associated virus
  source 1..2209: mol_type = genomic DNA
atggctgccgatggttatcctccagattggctcgaggacactctctctgaagggataagacagtggtggaagctcaaacctggcccaccaccaccaaagcccgcagagcggcataaggacgacagcaggggtcttgtgcttcctgggtacaagtacctcggacccttcaacggactcgacaagggggagccggtcaacgaggcagacgccgcggccctcgagcacgacaaggcctacgaccggcagctcgacagcggagacaacccgtacctcaagtacaaccacgccgacgcagagtttcaggagcgccttaaagaagatacgtcttttgggggcaacctcggacgagcagtcttccaggcgaaaaagagggttcttgaacctctgggcctggttgaggaacctgttaagacggctccgggaaaaaagaggccggtagagcactctcctgtggagccagactcctcctcgggaaccggaaaagcgggccagcggcctgcaagaaaaagattaaattttggtcagactggagacgcagactccgtacctgacccccagcctctcggacagccaccagcagccccctctggtctgggatctactacaatggctacaggcagtggcgcaccaatggcagacaataacgagggtgccgatggagtgggtaattcctcaggaaattggcattgcgattcccaatggctgggcgacagagtcatcaccaccagcacccgaacctgggccctgcccacatacaacaaccacctctacaagcaaatctccagccaatcaggagccagcaacgacaaccactactttggctacagcaccccctgggggtattttgacttcaacagattccactgccacttttcaccacgtgactggcaaagactcatcaacaacaactggggattccggcccaaaagactcaacttcaagctctttaatattcaagtcaaagaggtcacgcagaatgacggtacgacgacgattgccaataaccttaccagcacggttcaggtgtttactgactcggagtaccagctcccgtacgtcctgggctcggcgcatcaaggatgcctcccgccgtttccagcggacgtcttcatggtcccacagtatggatacctcaccctgaacaacgggagtcaggcggtaggacgctcttccttttactgcctggagtactttccttctcagatgctgcgtactggaaacaactttcagttcagctacacttttgaagacgtgcctttccacagcagctacgctcacagccagagtctggatcggctgatgaatcctctgatcgaccagtacctgtattatctgaacaagacacaaacaaatagtggaactcttcagcagtctcggctactgtttagccaagctggaccaaccaacatgtctcttcaagctaaaaactggctgcctggaccttgctacagacagcagcgtctgtcaaaacaggcaaacgacaacaacaacagcaactttccctggactgcagctacaaagtatcatctaaatggccgggactcgttggttaatccaggaccagctatggccagtcacaaggatgacgaagaaaagtttttccccatgcatggaaccctgatatttggtaaacaaggaacaaatgccaacgacgcggatttggaaaatgtcatgattacagatgaagaagaaatcagggccaccaatcccgtggctacggagcagtacgggactgtgtcaaataatttgcaaaactcaaacactggtccaactactggaactgtcaatcgccaaggagcgttacctggtatggtgtggcaggatcgagacgtgtacctgcagggacccatttgggccaagattcctcacaccgatggacactttcatccttctccactgatgggaggttttggactcaaacacccgcctcctcagatcatgatcaaaaacactcccgttccagccaatcctcccacaaacttcagttctgccaagtttgcttctttcatcacacagtattccacgggacaggtcagcgtggagatcgagtgggagctgcagaaggagaacagcaaacgctggaatcccgaaattcagtacacttccaactacaacaagtctgttaatgtggactttactgtggacactaatggtgtgtattcagagcctcgccccattggcaccagatacctgactcgtaatctgtaat

SEQ ID NO: 4829 - protein, 735 aa, Adeno-associated virus
MAADGYPPDWLEDTLSEGIRQWWKLKPGPPPPKPAERHKDDSRGLVLPGYKYLGPFNGLDKGEPVNEADAAALEHDKAYDRQLDSGDNPYLKYNHADAEFQERLKEDTSFGGNLGRAVFQAKKRVLEPLGLVEEPVKTAPGKKRPVEHSPVEPDSSSGTGKAGQRPARKRLNFGQTGDADSVPDPQPLGQPPAAPSGLGSTTMATGSGAPMADNNEGADGVGNSSGNWHCDSQWLGDRVITTSTRTWALPTYNNHLYKQISSQSGASNDNHYFGYSTPWGYFDFNRFHCHFSPRDWQRLINNNWGFRPKRLNFKLFNIQVKEVTQNDGTTTIANNLTSTVQVFTDSEYQLPYVLGSAHQGCLPPFPADVFMVPQYGYLTLNNGSQAVGRSSFYCLEYFPSQMLRTGNNFQFSYTFEDVPFHSSYAHSQSLDRLMNPLIDQYLYYLNKTQTNSGTLQQSRLLFSQAGPTNMSLQAKNWLPGPCYRQQRLSKQANDNNNSNFPWTAATKYHLNGRDSLVNPGPAMASHKDDEEKFFPMHGTLIFGKQGTNANDADLENVMITDEEEIRATNPVATEQYGTVSNNLQNSNTGPTTGTVNRQGALPGMVWQDRDVYLQGPIWAKIPHTDGHFHPSPLMGGFGLKHPPPQIMIKNTPVPANPPTNFSSAKFASFITQYSTGQVSVEIEWELQKENSKRWNPEIQYTSNYNKSVNVDFTVDTNGVYSEPRPIGTRYLTRNL

SEQ ID NO: 4830 - DNA, 2208 bp, Adeno-associated virus
  source 1..2208: mol_type = genomic DNA
atggctgccgatggttatcttccagattggctcgaggacactctctctgaaggaataagacagtggtggaagctcaaacctggcccaccaccaccaaagcccgcagagcggcataaggacgacagcaggggtcttgtgcttcctgggtacaggtacctcggacccttcaacggactcgacaagggagagccggtcaacgaggcagacgccgcggccctcgagcacgacaaggcctacgaccggcagctcgacagcggagacaacccgtacctcaagtacaaccacgtcgacgcggagtttcaggagcgtcttaaagaagatacgtcttttgggggcaacctcggacgagcagtcttccaggccaaaaagaggattcttgaacctctgggcctggttgaggaacctgttaaggcggctccgggagaaaagaggccggtagagcactctcctgcggagccagactcctcctcgggaaccggaaaagcgggccagcagcctgcaagaaagagattgaattttggtcagactggagacgcagactcagtacctgacccccagcctctcggacagccaccagcagccccctctggtctgggaactaatacgatggcttcaggcagtggcgcaccaatggcagacaataacgagggcgccgacggagtgggtaattcctcgggaaattggcattgcgattccacatggatgggcgacagagtcatcaccaccagcacccgcacctgggccctgcccacctacaacaaccatctgtacaagcaaatctccagccagtctggagccagcaacgacaaccactactttggctacagcaccccctgggggcattttgacttcaacagattccactgccacttctccccacgtgactggcaaagactcatcaacaacaactggggattccggcccaagagactcagcttcaagctctttaacattcaagtcaaagaggtcacgcagaatgacggtacgacgacgattgccaataaccttaccagcacggttcaggtgtttactgactcggagtaccagctcccgtacgtcctcggctcggcgcatcaaggatgcctcccgccgttcccagcagacgtcttcatggtgccacagtatggatacctcaccctgaacaacggcagtcaggcggtaggacgctcttccttttactgcctggagtactttccttctcagatgcttcgtaccggaaacaactttaccttcagctacacctttgaagacgttcctttccatagcagctacgctcacagccaaagtctggaccgtctcatgaatcctctcatcgaccagtacctgtattacttgagcagaacaaacactccaagcggaaccaccacgatgtccaggcttcagttttctcaggccggagcaagtgacattcgggaccagtctagaaactggcttcctggaccctgttaccgccagcagcgagtatcaaagacagctgcggacaacaacaacagtgattactcgtggactggagctaccaagtaccacctcaatggaagagactctctggtgaatccgggcccagctatggccagccacaaggacgatgaagaaaaatattttcctcagagcggggttctcatctttggaaaacaagactcgggaaaaactaatgtggacattgaaaaggttatgattacagacgaagaggaaatcaggaccaccaatcccgtggctacggagcagtatggttctgtatctaccaacctccagagcggcaacacacaagcagctacctcagatgtcaacacacaaggcgttcttccaggcatggtctggcaggacagagacgtgtacctgcaggggcccatctgggcaaagattccacacacggacggacattttcacccctctccccccatgggcggattcggacttaaacaccctcctccacaaattctcatcaagaacaccccggtacctgcgaatccttcgaccactttcagtgcggcaaagtttgcttccttcatcacacagtactccacggggcaggtcagcgtggagatcgagtgggagctgcagaaggagaacagcaaacgctggaatcccgaaattcagtacacttccaactacaacaaatctgttaatgtggactttactgtggacactaatggtgtgtattcagagcctcgccccattggcgccagatacctgactcgtaatctgtaa

SEQ ID NO: 4831 - protein, 735 aa, Adeno-associated virus
MAADGYLPDWLEDTLSEGIRQWWKLKPGPPPPKPAERHKDDSRGLVLPGYRYLGPFNGLDKGEPVNEADAAALEHDKAYDRQLDSGDNPYLKYNHVDAEFQERLKEDTSFGGNLGRAVFQAKKRILEPLGLVEEPVKAAPGEKRPVEHSPAEPDSSSGTGKAGQQPARKRLNFGQTGDADSVPDPQPLGQPPAAPSGLGTNTMASGSGAPMADNNEGADGVGNSSGNWHCDSTWMGDRVITTSTRTWALPTYNNHLYKQISSQSGASNDNHYFGYSTPWGHFDFNRFHCHFSPRDWQRLINNNWGFRPKRLSFKLFNIQVKEVTQNDGTTTIANNLTSTVQVFTDSEYQLPYVLGSAHQGCLPPFPADVFMVPQYGYLTLNNGSQAVGRSSFYCLEYFPSQMLRTGNNFTFSYTFEDVPFHSSYAHSQSLDRLMNPLIDQYLYYLSRTNTPSGTTTMSRLQFSQAGASDIRDQSRNWLPGPCYRQQRVSKTAADNNNSDYSWTGATKYHLNGRDSLVNPGPAMASHKDDEEKYFPQSGVLIFGKQDSGKTNVDIEKVMITDEEEIRTTNPVATEQYGSVSTNLQSGNTQAATSDVNTQGVLPGMVWQDRDVYLQGPIWAKIPHTDGHFHPSPPMGGFGLKHPPPQILIKNTPVPANPSTTFSAAKFASFITQYSTGQVSVEIEWELQKENSKRWNPEIQYTSNYNKSVNVDFTVDTNGVYSEPRPIGARYLTRNL

SEQ ID NO: 4832 - DNA, 2208 bp, Adeno-associated virus
  source 1..2208: mol_type = genomic DNA
atggctgccgatggttatcttccagattggctcgaggacaccctctctgaaggaataagacagtggtggaagctcaaacctggcccaccaccaccaaagcccgcagagcggcataaggacgacagcaggggtcttgtgcttcctgggtacaagtacctcggacccttcaacggactcgacaagggagagccggtcaacgaggcagacgccgcggccctcgagcacgacaaggcctacgaccggcagctcgacagcggagataacccgtacctcaagtacaaccacgccgacgcggagtttcaggagcgccttaaagaggatacgtcttttgggggcaacctcggacgagcagtcttccaggccaaaaagaggattcttgaacctctgggcctggttgaggaacctgttaagacggctccgggaaaaaagaggccggtagagcactctcctgcggagccagactcctcctcgggaaccggaaaagcgggccagcagcctgcaagaaagagattgaattttggtcagactggagacgcagactcagtacctgacccccggcctctcggacagccaccagcagccccctctggtctgggaactaatacgatggcttcaggcagtggcgcaccaatggcagacaataacgagggcgccgacggagtgggtaattcctcgggaaattggcattgcgattccacatggatgggcgacagagtcatcaccaccagcacccgcacctgggccctgcccacctacaacaaccatctgtacaagcaaatctccagccagtctggagccagcaacgacaaccactactttggctacagcaccccctgggggtattttgacttcaacagattccactgccacttctccccacgtgactggcaaagactcatcaacaacaactggggattccggcccaagagactcagcttcaagctctttaacattcaagtcaaagaggtcacgcagaatgacggtacgacgacgattgccaataaccttaccagcacggttcaggtgtttactgactcggagtaccagctcccgtacgtcctcggctcggcgcatcaaggatgcctcccgccgttcccagcagacgtcttcatggtgccacagtatggatacctcaccctgaacaacggcagtcaggcggtaggacgctcttccttttactgcctggagtactttccttctcagatgcttcgtaccggaaacaactttaccttcagctacacctttgaagacgttcctttccatagcagctacgctcacagccaaagtctggaccgtctcatgaatcctctcatcgaccagtacctgtattacttgagcagaacaaacactccaagcggaaccaccacgatgtccaggcttcagttttctcaggccggagcaagtgacattcgggaccagtctagaaactggcttcctggaccctgttaccgccagcagcgagtatcaaagacagctgcggacaacaacaacagtgattactcgtggactggagctaccaagtaccacctcaatggaagagactctctggtgaatccgggcccagctatggccagccacaaggacgatgaagaaaaatattttcctcagagcggggttctcatctttggaaaacaagactcgggaaaaactaatgtggacattgaaaaggttatgattacagacgaagaggaaatcaggaccaccaatcccgtggctacggagcagtatggttctgtatctaccaacctccagagcggcaacacacaagcagctacctcagatgtcaacacacaaggcgttcttccaggcatggtctggcaggacagagacgtgtacctgcaggggcccatctgggcaaagattccacacacggacggacattttcacccctctcccctcatgggcggattcggacttaaacaccctcctccacaaattctcatcaagaacaccccggtacctgcgaatccttcgaccactttcagtgcggcaaagtttgcttccttcatcacacagtactccacggggcaggtcagcgtggagatcgagtgggagctgcagaaggagaacagcaaacgctggaatcccgaaattcagtacacttccaactacaacaaatctgttaatgtggactttactgtggacactaatggtgtgtattcagagcctcgccccattggcaccagatacctgactcgtaatctgtaa

SEQ ID NO: 4833 - protein, 735 aa, Adeno-associated virus
MAADGYLPDWLEDTLSEGIRQWWKLKPGPPPPKPAERHKDDSRGLVLPGYKYLGPFNGLDKGEPVNEADAAALEHDKAYDRQLDSGDNPYLKYNHADAEFQERLKEDTSFGGNLGRAVFQAKKRILEPLGLVEEPVKTAPGKKRPVEHSPAEPDSSSGTGKAGQQPARKRLNFGQTGDADSVPDPRPLGQPPAAPSGLGTNTMASGSGAPMADNNEGADGVGNSSGNWHCDSTWMGDRVITTSTRTWALPTYNNHLYKQISSQSGASNDNHYFGYSTPWGYFDFNRFHCHFSPRDWQRLINNNWGFRPKRLSFKLFNIQVKEVTQNDGTTTIANNLTSTVQVFTDSEYQLPYVLGSAHQGCLPPFPADVFMVPQYGYLTLNNGSQAVGRSSFYCLEYFPSQMLRTGNNFTFSYTFEDVPFHSSYAHSQSLDRLMNPLIDQYLYYLSRTNTPSGTTTMSRLQFSQAGASDIRDQSRNWLPGPCYRQQRVSKTAADNNNSDYSWTGATKYHLNGRDSLVNPGPAMASHKDDEEKYFPQSGVLIFGKQDSGKTNVDIEKVMITDEEEIRTTNPVATEQYGSVSTNLQSGNTQAATSDVNTQGVLPGMVWQDRDVYLQGPIWAKIPHTDGHFHPSPLMGGFGLKHPPPQILIKNTPVPANPSTTFSAAKFASFITQYSTGQVSVEIEWELQKENSKRWNPEIQYTSNYNKSVNVDFTVDTNGVYSEPRPIGTRYLTRNL

SEQ ID NO: 4834 - DNA, 2208 bp, Adeno-associated virus
  source 1..2208: mol_type = genomic DNA
atggctgccgatggttatcttccagattggctcgaggacactctctctgaaggaataagacagtggtggaagctcaaacctggcccaccaccaccaaagcccgcagagcggcataaggacgacagcaggggtcttgtgcttcctgggtacaagtacctcggacccttcaacggactcgacaagggagagccggtcaacgaggcagacgccgcggccctcgagcacgacaaggcctacgaccggcagctcgacagcggagacaacccgtacctcaagtacaaccacgccgacgcggagtttcaggagcgccttaaaggagatacgtcttttgggggcaacctcggacgagcagtcttccaggccaaaaagaggattcttgaacctctgggcctggttgaggaacctgttaagacggctccgggaaaaaagaggccggtagagcactctcctgcggagccagactcctcctcgggaaccggaaaagcgggccagcagcctgcaagaaagagattgaattttggtcagactggagacgcagactcagtacctgacccccagcctctcggacagccaccagcagccccctctggtctgggaactaatacgatggcttcaggcagtggcgcaccaatggcagacaataacgagggcgccgacggagtgggtaattcctcgggaaattggcattgcgattccacatggatgggcggcagagtcatcaccaccagcacccgcacctgggccctgcccacctacaacaaccatctgtacaagcaaatctccagccagtctggagccagcaacgacaaccactactttggctacagcaccccctgggggtattttgacttcaacagattccactgccacttctccccacgtgactggcaaagactcatcaacaacaactggggattccggcccaagagactcagcttcaagctctttaacattcaagtcaaagaggtcacgcagaatgacggtacgacgacgattgccaataaccttaccagcacggttcaggtgtttactgactcggagtaccagctcccgtacgtcctcggctcggcgcatcaaggatgcctcccgccgttcccagcagacgtcttcatggtgccacagtatggatacctcaccctgaacaacggcagtcaggcggtaggacgctcttccttttactgcctggagtactttccttctcagacgcttcgtaccggaaacaactttaccttcagctacacctttgaagacgttcctttccatagcagctacgctcacagccaaagtctggaccgtctcatgaatcctctcatcgaccagtacctgtattacttgagcagaacaaacactccaagcggaaccaccacgatgtccaggcttcagttttctcaggccggagcaagtgacattcgggaccagtctagaaactggcttcctggaccctgttaccgccagcagcgagtatcaaagacagctgcggacaacaacaacagtgattactcgtggactggagctaccaagtaccacctcaatggaagagactctctggtgaatccgggcccagctatggccagccacaaggacgatgaagaaaaatattttcctcagagcggggttctcatctttggaaaacaagactcgggaaaaactaatgtggacattgaaaaggttatgattacagacgaagaggaaatcaggaccaccaatcccgtggctacggagcagtatggttctgtatctaccaacctccagagcggcaacacacaagcagctacctcagatgtcaacacacaaggcgttcttccaggcatggtctggcaggacagagacgtgtacctgcaggggcccatctgggcaaagattccacacacggacggacattttcacccctctcccctcatgggcggattcggacttaaacaccctcctccacaaattctcatcaagaacaccccggtacctgcgaatccttcgaccactttcagtgcggcaaagtttgcttccttcatcacacagtactccacggggcaggtcagcgtggagatcgagtgggagctgcagaaggagaacagcaaacgctggaatcccgaaattcagtacacttccaactacaacaaatctgttaatgtggactttactgtggacactaatggtgtgtattcagagcctcgccccattggcaccagatacctgactcgtaatctgtaa

SEQ ID NO: 4835 - protein, 735 aa, Adeno-associated virus
MAADGYLPDWLEDTLSEGIRQWWKLKPGPPPPKPAERHKDDSRGLVLPGYKYLGPFNGLDKGEPVNEADAAALEHDKAYDRQLDSGDNPYLKYNHADAEFQERLKGDTSFGGNLGRAVFQAKKRILEPLGLVEEPVKTAPGKKRPVEHSPAEPDSSSGTGKAGQQPARKRLNFGQTGDADSVPDPQPLGQPPAAPSGLGTNTMASGSGAPMADNNEGADGVGNSSGNWHCDSTWMGGRVITTSTRTWALPTYNNHLYKQISSQSGASNDNHYFGYSTPWGYFDFNRFHCHFSPRDWQRLINNNWGFRPKRLSFKLFNIQVKEVTQNDGTTTIANNLTSTVQVFTDSEYQLPYVLGSAHQGCLPPFPADVFMVPQYGYLTLNNGSQAVGRSSFYCLEYFPSQTLRTGNNFTFSYTFEDVPFHSSYAHSQSLDRLMNPLIDQYLYYLSRTNTPSGTTTMSRLQFSQAGASDIRDQSRNWLPGPCYRQQRVSKTAADNNNSDYSWTGATKYHLNGRDSLVNPGPAMASHKDDEEKYFPQSGVLIFGKQDSGKTNVDIEKVMITDEEEIRTTNPVATEQYGSVSTNLQSGNTQAATSDVNTQGVLPGMVWQDRDVYLQGPIWAKIPHTDGHFHPSPLMGGFGLKHPPPQILIKNTPVPANPSTTFSAAKFASFITQYSTGQVSVEIEWELQKENSKRWNPEIQYTSNYNKSVNVDFTVDTNGVYSEPRPIGTRYLTRNL

SEQ ID NO: 4836 - DNA, 2208 bp, Adeno-associated virus
  source 1..2208: mol_type = genomic DNA
atggctgccgatggttatcttccagattggctcgaggacactctctctgaaggaataagacagtggtggaagctcaaacctggcccaccaccaccaaagcccgcagagcggcataaggacgacagcaggggtcttgtgcttcctgggtacaagtacctcggacccttcaacggactcgacaagggagagccggtcaacgaggcagacgccgcggccctcgagcacgacaaggcctacgaccggcagctcgacagcggagacaacccgtacctcaagtacaaccacgccgacgcggagtttcaggagcgtcttaaagaagatacgtcttttgggggcaacctcggacgagcagtcttccaggccaaaaagaggattcttgaacctctgggcctggttgaggaacctgttaagacggctccgggaaaaaagaggccggtagagcactctcctgcggagccagactcctcctcgggaaccggaaaagcgggccagcagcctgcaagaaagagattgaattttggtcagactggagacgcagactcagtacctgacccccagcctctcggacagccaccagcagccccctctggtctgggaactaatacgatggcttcaggcagtggcgcaccaatggcagacaataacgagggcgccgacggagtgggtaattcctcgggaaattggcattgcgattccacatggatgggcgacagagtcatcaccaccagcacccgcacctgggccctgcccacctgcaacaaccatctgtacaagcaaatctccagccagtctggagccagcaacgacaaccactactttggctacagcaccccctgggggtattttgacttcaacagattccactgccacttctccccacgtgactggcaaagactcatcaacaacaactggggattccggcccaagagactcagcttcaagctctttaacattcaagtcaaagaggtcacgcagaatgacggtacgacgacgattgccaataaccttaccagcacggttcaggtgtttactgactcggagtaccagctcccgtacgtcctcggctcggcgcatcaaggatgcctcccgccgttcccagcagacgtcttcatggtgccacagtatggatacctcaccctgaacaacggcagtcaggcggtaggacgctcttccttttactgcctggagtattttccttctcagatgcttcgtaccggaaacaactttaccttcagctacacctttgaagacgttcctttccatagcagctacgctcacagccaaagtctggaccgtctcatgaatcctctcatcgaccagtacctgtattacttgagcagaacaaacactccaagcggaaccaccacgatgtccaggcttcagttttctcaggccggagcaagtgacattcgggaccagtctagaaactggcttcctggaccctgttaccgccagcagcgagtatcaaagacagctgcggacaacaacaacagtgattactcgtggactggagctaccaagtaccacctcaatggaagagactctctggtgaatccgggcccagctatggccagccacaaggacgatgaagaaaaatattttcctcagagcggggttctcatctttggaaaacaagactcgggaaaaactaatgtggacattgaaaaggttatgattacagacgaagaggaaatcaggaccaccaatcccgtggctacggagcagtatggttctgtatctacctacctccagagcggcaacacacaagcagctacctcagatgtcaacacacaaggcgttcttccaggcatggtctggcaggacagagacgtgtacctgcgggggcccatctgggcaaagattccacacacggacggacattttcacccctctcccctcatgggcggatttggacttaaacaccctcctccacaaattctcatcaagaacaccccggtacctgcgaatccttcgaccactttcagtgcggcaaagtttgcttccttcatcacacagtactccacggggcaggtcagcgtggagatcgagtgggagctgcagaaggagaacagcaaacgctggaatcccgaaattcagtacacttccaactacaacaaatctgttaatgtggactttactgtggacactaatggtgtgtattcagagcctcgccccattggcaccagatacctgactcgtaatctgtaa

SEQ ID NO: 4837 - protein, 735 aa, Adeno-associated virus
MAADGYLPDWLEDTLSEGIRQWWKLKPGPPPPKPAERHKDDSRGLVLPGYKYLGPFNGLDKGEPVNEADAAALEHDKAYDRQLDSGDNPYLKYNHADAEFQERLKEDTSFGGNLGRAVFQAKKRILEPLGLVEEPVKTAPGKKRPVEHSPAEPDSSSGTGKAGQQPARKRLNFGQTGDADSVPDPQPLGQPPAAPSGLGTNTMASGSGAPMADNNEGADGVGNSSGNWHCDSTWMGDRVITTSTRTWALPTCNNHLYKQISSQSGASNDNHYFGYSTPWGYFDFNRFHCHFSPRDWQRLINNNWGFRPKRLSFKLFNIQVKEVTQNDGTTTIANNLTSTVQVFTDSEYQLPYVLGSAHQGCLPPFPADVFMVPQYGYLTLNNGSQAVGRSSFYCLEYFPSQMLRTGNNFTFSYTFEDVPFHSSYAHSQSLDRLMNPLIDQYLYYLSRTNTPSGTTTMSRLQFSQAGASDIRDQSRNWLPGPCYRQQRVSKTAADNNNSDYSWTGATKYHLNGRDSLVNPGPAMASHKDDEEKYFPQSGVLIFGKQDSGKTNVDIEKVMITDEEEIRTTNPVATEQYGSVSTYLQSGNTQAATSDVNTQGVLPGMVWQDRDVYLRGPIWAKIPHTDGHFHPSPLMGGFGLKHPPPQILIKNTPVPANPSTTFSAAKFASFITQYSTGQVSVEIEWELQKENSKRWNPEIQYTSNYNKSVNVDFTVDTNGVYSEPRPIGTRYLTRNL

SEQ ID NO: 4838 - DNA, 2208 bp, Adeno-associated virus; identical to SEQ ID NO: 4832
  source 1..2208: mol_type = genomic DNA

SEQ ID NO: 4839 - protein, 735 aa, Adeno-associated virus; identical to SEQ ID NO: 4833

SEQ ID NO: 4840 - DNA, 2208 bp, Adeno-associated virus
  source 1..2208: mol_type = genomic DNA
atggctgccgatggttatcttccagattggctcgaggacactctctctgaaggaataagacagtggtggaagctcaaacctggcccaccaccaccaaagcccgcagagcggcataaggacggcagcaggggtcttgtgcttcctgggtacaagtacctcggacccttcaacggactcgacaagggagagccggtcaacgaggcagacgccgcggccctcgagcacgacaaggcctacgaccggcagctcaacagcggagacaacccgtacctcaagtacaaccacgccgacgcggagtttcaggagcgccttaaagaagatacgtcttttgggggcaacctcggacgagcagtcttccaggcaaaaaagagggttcttgaacctctgggcctggttgaggagcctgttaaaacggctccgggaaaaaagagaccggtagagcactctcctgcggagccagactcctcctcgggaaccggaaaagcgggccagcagcctgcaagaaagagattgaattttggtcagactggagacgcagactccgtacctgacccccagcctctcggacagccaccagcagccccctctggtctgggatctactacaatggctacaggcagtggcgcaccaatggcagacaataacgagggtgccgatggagtgggtaattcctcaggaaattggcattgcgattcccaatggctgggcgacagagtcatcaccacaagcactcgaacctgggccctgcccacctacaacaaccacctctacaagcaaatctccagccaatcaggagcctcaaacgacaaccactattttggctacagcaccccttgggggtattttgacttcaacagattccactgccacttttcaccacgtgactggcaaagactcatcaacaacaactggggattccgacccaagagactcaacttcaagctctttaacattcaagtcaaagaggtcacgcagaatgacggtacgacgacgattgccaataaccttaccagcacggttcaggtgtttactgactcggagtaccagctcccgtacgtcctcggctcggcgcatcaaggatgcctcccgccgttcccagcggacgtcttcatggtcccacagtatggatacctcaccctgaacaacgggagtcaggcggtaggacgctctcccttttactgcctggagtactttccttctcagatgctgcgtactggaaacaactttcagttcagctacacttttgaagacgtgcctttccacagcagctacgctcacagccagagtctggatcggctgatgaatcctctgatcgaccagtacctgtattatctgaacaagacacaaacaaatagtggaactcttcagcagtctcggctactgtttagccaagctggacccaccaacatgtctcttcaagctaaaaactggctgcctggaccttgctacagacagcagcgtctgtcaaagcaggcaaacgacaacaacaacagcaactttccctggactgcagctacaaagtatcatctaaatggccgggactcgttggttaatccaggaccagctatggccagtcacaaggatgacgaagaaaagtttttccccatgcatggaaccctgatatttggtaaacaaggaacaaatgccaacgacgcggatttggaaaatgtcatgattacagatgaagaagaaatcaggaccaccaatcccgtggctacggagcagtacgggactgtgtcaaataatttgcaaaactcaaacactggtccaactactggaactgtcaatcaccaaggagcgttacctggtatggtgtggcaggatcgagatgtgtaccttcagggacccatttgggccaagattcctcacaccgatggacactttcatccttctccactgatgggaggttttggactcaaacacccgcctcctcagattatgatcaaaaacactcccgttccagccaatcctcctacaaacttcagttctgccaagtttgcttctttcatcacacagtattccacggggcaggtcagcgtggagatcgagtgggagctgcagaaggagaacagcaaacgctggaatcccgaaattcagtacacttccaactacaacaaatctgttaatgtggactttactgtggacaataatggcgtgtactcagagcctcgccccattggcaccagatacctgactcgtaatctgtaa

SEQ ID NO: 4841 - protein, 735 aa, Adeno-associated virus
MAADGYLPDWLEDTLSEGIRQWWKLKPGPPPPKPAERHKDGSRGLVLPGYKYLGPFNGLDKGEPVNEADAAALEHDKAYDRQLNSGDNPYLKYNHADAEFQERLKEDTSFGGNLGRAVFQAKKRVLEPLGLVEEPVKTAPGKKRPVEHSPAEPDSSSGTGKAGQQPARKRLNFGQTGDADSVPDPQPLGQPPAAPSGLGSTTMATGSGAPMADNNEGADGVGNSSGNWHCDSQWLGDRVITTSTRTWALPTYNNHLYKQISSQSGASNDNHYFGYSTPWGYFDFNRFHCHFSPRDWQRLINNNWGFRPKRLNFKLFNIQVKEVTQNDGTTTIANNLTSTVQVFTDSEYQLPYVLGSAHQGCLPPFPADVFMVPQYGYLTLNNGSQAVGRSPFYCLEYFPSQMLRTGNNFQFSYTFEDVPFHSSYAHSQSLDRLMNPLIDQYLYYLNKTQTNSGTLQQSRLLFSQAGPTNMSLQAKNWLPGPCYRQQRLSKQANDNNNSNFPWTAATKYHLNGRDSLVNPGPAMASHKDDEEKFFPMHGTLIFGKQGTNANDADLENVMITDEEEIRTTNPVATEQYGTVSNNLQNSNTGPTTGTVNHQGALPGMVWQDRDVYLQGPIWAKIPHTDGHFHPSPLMGGFGLKHPPPQIMIKNTPVPANPPTNFSSAKFASFITQYSTGQVSVEIEWELQKENSKRWNPEIQYTSNYNKSVNVDFTVDNNGVYSEPRPIGTRYLTRNL

SEQ ID NO: 4842 - DNA, 2208 bp, Adeno-associated virus
  source 1..2208: mol_type = genomic DNA
atggctgccgatggttatcttccagattggctcgaggacactctctctgaaggaataagacagtggtggaagctcaaacctggcccaccaccaccaaagcccgcagagcggcataaggacgacagcaggggtcttgtgcttcctgggtacaagtacctcggacccttcaacggactcgacaagggagagccggtcaacgaggcagacgccgcggccctcgagcacgacaaggcctacgaccggcagctcgacagcggagacaacccgtacctcaagtacaaccacgccgacgcggagtttcaggagcgtcttaaagaagatacgtcttttgggggcaacctcggacgagcagtcttccaggccaaaaagaggattcttgaacctctgggcctggttgaggaacctgttaagacggctccgggaaaaaagaggccggtagagcactctcctgcggagccagactcctcctcgggaaccggaaaagcgggccagcagcctgcaagaaagagattgaattttggtcagactggagacgcagactcagtacctgacccccagcctctcggacagccaccagcagccccctctggtctgggaactaatacgatggcttcaggcagtggcgcaccaatggcagacaataacgagggcgccgacggagtgggtaattcctcgggaaattggcattgcgattccacatggatgggcgacagagtcatcaccaccagcacccgcacctgggccctgcccacctacaacaaccatctgtacaagcaaatctccagccagtctggagccagcaacgacaaccactactttggctacagcaccccctgggggtattttgacttcaacagattccactgccacttctccccacgtgactggcaaagactcatcaacaacaactggggattccggcccaagagactcagcttcaagctctttaacattcaagtcaaagaggtcacgcagaatgacggtacgacgacgattgccaataaccttaccagcacggttcaggtgtttactgactcggagtaccagctcccgtacgtcctcggctcggcgcatcaaggatgcctcccgccgttcccagcagacgtcttcatggtgccacagtatggatacctcaccctgaacaacggcagtcaggcggtaggacgctcttccttttactgcctggagtactttccttctcagatgcttcgtaccggaaacaactttaccttcagctacacctttgaagacgttcctttccatagcagctacgctcacagccaaagtctggaccgtctcatgaatcctctcatcgaccagtacctgtattacttgagcagaacaaacactccaagcggaaccaccacgatgtccaggcttcagttttctcaggccggagcaagtgacattcgggaccagtctagaaactggcttcctggaccctgttaccgccagcagcgagtatcaaagacagctgcggacaacaacaacagtgattactcgtggactggagctaccaagtaccacctcaatggaagagactctctggtgaatccgggcccagctatggccagccacaaggacgatgaagaaaaatattttcctcagagcggggttctcatctttggaaaacaagactcgggaaaaactaatgtggacattgaaaaggttatgattacagacgaagaggaaatcaggaccaccaatcccgtggctacggagcagtatggttctgtatctaccaacctccagagcggcaacacacaagcagctacctcagatgtcaacacacaaggcgttcttccaggcatggtctggcaggacagagacgtgtacctgcaggggcccatctgggcaaagattccacacacggacggacattttcacccctctcccctcatgggcggattcggacttaaacaccctcctccacaaattctcatcaagaacaccccggtacctgcgaatccttcgaccactttcagtgcggcaaagtttgcttccttcatcacacagtactccacggggcaggtcagcgtggagatcgagtgggagctgcagaaggagaacagcaaacgctggaatcccgaaattcagtacacttccaactacaacaaatctgttaatgtggactttactgtggacactaatggtgtgtattcagagcctcgccccattggcaccagatacctgactcgtaatctgtaa

SEQ ID NO: 4843 - protein, 735 aa, Adeno-associated virus
MAADGYLPDWLEDTLSEGIRQWWKLKPGPPPPKPAERHKDDSRGLVLPGYKYLGPFNGLDKGEPVNEADAAALEHDKAYDRQLDSGDNPYLKYNHADAEFQERLKEDTSFGGNLGRAVFQAKKRILEPLGLVEEPVKTAPGKKRPVEHSPAEPDSSSGTGKAGQQPARKRLNFGQTGDADSVPDPQPLGQPPAAPSGLGTNTMASGSGAPMADNNEGADGVGNSSGNWHCDSTWMGDRVITTSTRTWALPTYNNHLYKQISSQSGASNDNHYFGYSTPWGYFDFNRFHCHFSPRDWQRLINNNWGFRPKRLSFKLFNIQVKEVTQNDGTTTIANNLTSTVQVFTDSEYQLPYVLGSAHQGCLPPFPADVFMVPQYGYLTLNNGSQAVGRSSFYCLEYFPSQMLRTGNNFTFSYTFEDVPFHSSYAHSQSLDRLMNPLIDQYLYYLSRTNTPSGTTTMSRLQFSQAGASDIRDQSRNWLPGPCYRQQRVSKTAADNNNSDYSWTGATKYHLNGRDSLVNPGPAMASHKDDEEKYFPQSGVLIFGKQDSGKTNVDIEKVMITDEEEIRTTNPVATEQYGSVSTNLQSGNTQAATSDVNTQGVLPGMVWQDRDVYLQGPIWAKIPHTDGHFHPSPLMGGFGLKHPPPQILIKNTPVPANPSTTFSAAKFASFITQYSTGQVSVEIEWELQKENSKRWNPEIQYTSNYNKSVNVDFTVDTNGVYSEPRPIGTRYLTRNL

SEQ ID NO: 4844 - DNA, 2208 bp, Adeno-associated virus
  source 1..2208: mol_type = genomic DNA
atggctgccgatggttatcttccagattggctcgaggacactctctctgaaggaataagacagtggtggaagctcaaacctggcccaccaccaccaaagcccgcagagcggcataaggacgacagcaggggtcttgtgcttcctgggtacaagtacctcggacccttcaacggactcgacaagggagagccggtcaacgaggcagacgccgcggccctcgagcacgacaaggcctacgaccggcagctcgacagcggagacaacccgtacctcaagtacaaccacgccgacgcggagtttcaggagcgtcttaaagaagatacgtcttttgggggcaacctcggacgagcagtcttccaggccaaaaagaggattcttgaacctctgggcctggttgaggaacctgttaagacggctccgggaaaaaagaggccggtagagcactctcctgcggagccagactcctcctcgggaaccggaaaagcgggccagcagcctgcaagaaagagattgaattttggtcagactggagacgcagactcagtacctgacccccagcctctcggacagccaccagcagccccctctggtctgggaactaatacgatggcttcaggcagtggcgcaccaatggcagacaataacgagggcgccgacggagtgggtaattcctcgggaaattggcattgcgattccacatggatgggcgacagagtcatcaccaccagcacccgcacctgggccctgcccacctacaacaaccatctgtacaagcaaatctccagccagtctggagccagcaacgacaaccactactttggctacagcaccccctgggggtatttcgacttcaacagattccactgccacttctccccacgtgactggcaaagactcatcaacaacaactggggattccggcccaagagactcagcttcaagctctttaacattcaagtcaaagaggtcacgcagaatgacggtacgacgacgattgccaataaccttaccagcacggttcaggtgtttactgactcggggtaccagctcccgtacgtcctcggctcggcgcatcaaggatgccttccgccgttcccagcagacgtcttcatggtgccacagtatggatacctcaccctgaacaacggcagtcaggcggtaggacgctcttccttttactgcctggagtactttccttctcagatgcttcgtaccggaaacaactttaccttcagctacacctttgaagacgttcctttccatagcagctacgctcacggccaaagtctggaccgtctcatgaatcctctcatcgaccagtacctgtattacttgagcagaacaaacactccaagcggaaccaccacgatgtccaggcttcagttttctcaggccggagcaagtgacgttcgggaccagtctagaaactggcttcctggaccctgttaccgccagcagcgagtatcaaagacagctgcggacaacaacaacagtgattactcgtggactggagctaccaagtaccacctcaatggaagagactctctggtgaatccgggcccagctatggccagccacaaggacgatgaagaaaaatattttcctcagagcggggttctcgtctttggaaaacaagactcgggaaaaactaatgtggacattgaaaaggttatgattacagacgaagaggaaatcaggaccaccaatcccgcggctacggagcagtatggttctgtatctaccaacctccagagcggcaacacacaagcagctacctcagatgtcaacacacaaggcgttcttccaggcatggtctggcaggacagagacgtgtacctgcaggggcccatctgggcaaagattccacacacggacggacattttcacccctctcccctcatgggcggattcggacttaaacaccctcctccacaaattctcatcaagaacaccccggtacctgcgaatccttcgaccactttcagtgcggcaaagtttgtttccttcatcacacagtactccacggggcaggtcagcgtggagatcgagtgggagctgcagaaggagaacagcaaacgctggaatcccgaaattcagtacacttccaactacaacaaatctgttaatgtggactttactgtggacactaatggtgtgtattcagagcctcgccccattggcaccagatacctgactcgtaatctgtaa

SEQ ID NO: 4845 - protein, 735 aa, Adeno-associated virus
MAADGYLPDWLEDTLSEGIRQWWKLKPGPPPPKPAERHKDDSRGLVLPGYKYLGPFNGLDKGEPVNEADAAALEHDKAYDRQLDSGDNPYLKYNHADAEFQERLKEDTSFGGNLGRAVFQAKKRILEPLGLVEEPVKTAPGKKRPVEHSPAEPDSSSGTGKAGQQPARKRLNFGQTGDADSVPDPQPLGQPPAAPSGLGTNTMASGSGAPMADNNEGADGVGNSSGNWHCDSTWMGDRVITTSTRTWALPTYNNHLYKQISSQSGASNDNHYFGYSTPWGYFDFNRFHCHFSPRDWQRLINNNWGFRPKRLSFKLFNIQVKEVTQNDGTTTIANNLTSTVQVFTDSGYQLPYVLGSAHQGCLPPFPADVFMVPQYGYLTLNNGSQAVGRSSFYCLEYFPSQMLRTGNNFTFSYTFEDVPFHSSYAHGQSLDRLMNPLIDQYLYYLSRTNTPSGTTTMSRLQFSQAGASDVRDQSRNWLPGPCYRQQRVSKTAADNNNSDYSWTGATKYHLNGRDSLVNPGPAMASHKDDEEKYFPQSGVLVFGKQDSGKTNVDIEKVMITDEEEIRTTNPAATEQYGSVSTNLQSGNTQAATSDVNTQGVLPGMVWQDRDVYLQGPIWAKIPHTDGHFHPSPLMGGFGLKHPPPQILIKNTPVPANPSTTFSAAKFVSFITQYSTGQVSVEIEWELQKENSKRWNPEIQYTSNYNKSVNVDFTVDTNGVYSEPRPIGTRYLTRNL

SEQ ID NO: 4846 - DNA, 2208 bp, Adeno-associated virus
  source 1..2208: mol_type = genomic DNA
atggctgccgatggttatcttccagattggctcgaggacactctctctgaaggaataagacagtggtggaaactcaaacctggcccaccaccaccaaagcccgcagagcggcataaggacgacagcaggggtcttgtgcttcctgggtacaagtacctcggacccttcaacggactcgacaagggagagccggtcaacgaggcagacgccgcggccctcgagcacgacaaggcctacgaccggcagctcgacagcggagacaacccgtacctcaagtacaaccacgccgacgcggagtttcaggagcgccttaaagaagatacgtcttttgggggcaacctcggacgagcagtcttccaggcaaaaaagagggttctggaacctctgagcctggttgaggagcctgttaagacggctccgggaaaaaagaggccggtagagcactctcccgcagagccagattcctcctccggaactggaaagtcgggcaaccagcctgcaagaaagagattgaatttcggtcagactggagactcagactccgtacctgacccccagcctctcggacagccaccagcagccccctctggtctgggaactaatacgatggctacaggcagtggcgcaccaatggcagacaataacgagggcgccgacggagtgggtaattcctcgggaaattggcattgcgattccacatggatgggcgacagagtcatcaccaccagcacccgaacctgggccctgcccacctacaacaaccatctgtacaagcaaatatccagccagtctggagccagcaacgacaatcactactttggctacagcaccccctgggggtattttgacttcaacagattccactgccacttttcaccacgtgactggcaaagactcatcaacaacaactggggattccgacccaagagactcaacttcaagctctttaacattcaagtcaaagaggtcacgcagaatgacggtacgacgacgattgccaataaccttaccagcacggttcaggtgtttactgactcggagtaccagctcccgtacgtcctcggctcggcgcatcaaggatgcctcccgccgttcccagcagacgtcttcatggtgccacagtatggatacctcaccctgaacaacgggagtcaggcagtaggacgctcttcattttactgcctagagtactttccttctcagatgctgcgtaccggaaacaactttaccttcagctacacctttgaggacgttcctttccacagcagctacgctcacagccagagtttggaccgtctcatgaatcctctcatcgaccagtacctgtattacttgagcagaacaaacactccaagcggaaccaccacgcagtccaggcttcagttttctcaggccggagcgagtgacattcaggaccagtctaggaactggcttcctggaccctgttaccgtcagcagcgagtatcaaagacatctgcggataacaacaacagtgaatactcgtggactggagctaccaagtaccacctcaatggcagagactctctggtgaatccgggcccggccatggccagccacaaagacgatgaagaaaagttttttcctcagagcggggttcttatctttgggaagcaaggctcagagaaaacaaatgtggatattgaaaaggtcatgattacagacgaagaggaaatcaggaccaccaatcccgtggctacggagcagtatggttctgtatctaccaacctccagagcggcaacacacaagcagctaccgcagatgtcaacacacaaggcgttcttccaggcatggtcgggcaagacagagacgtgtacctgcaggggcctacttgggcaaagattccacacacggacggacattttcacccctctcccctcatgggcggatttggacttaaacaccctcctccacagattctcatcaagaacaccccggtacctgcgaatccttcgaccaccttcagtgcggcaaagtttgcttccttcattacacagtactccacggggcaggtcagcgtggagatcgagtgggagctgcagaaggagaacagcaaacgctggaatcccgagatccagtacacttccaactacaacaagtctgttaatgtggactttactgtggacactaatggcgtgtattcagagcctcgccccattggcaccagatacctgactcgtaatctgtaa

SEQ ID NO: 4847 - protein, 735 aa, Adeno-associated virus
MAADGYLPDWLEDTLSEGIRQWWKLKPGPPPPKPAERHKDDSRGLVLPGYKYLGPFNGLDKGEPVNEADAAALEHDKAYDRQLDSGDNPYLKYNHADAEFQERLKEDTSFGGNLGRAVFQAKKRVLEPLSLVEEPVKTAPGKKRPVEHSPAEPDSSSGTGKSGNQPARKRLNFGQTGDSDSVPDPQPLGQPPAAPSGLGTNTMATGSGAPMADNNEGADGVGNSSGNWHCDSTWMGDRVITTSTRTWALPTYNNHLYKQISSQSGASNDNHYFGYSTPWGYFDFNRFHCHFSPRDWQRLINNNWGFRPKRLNFKLFNIQVKEVTQNDGTTTIANNLTSTVQVFTDSEYQLPYVLGSAHQGCLPPFPADVFMVPQYGYLTLNNGSQAVGRSSFYCLEYFPSQMLRTGNNFTFSYTFEDVPFHSSYAHSQSLDRLMNPLIDQYLYYLSRTNTPSGTTTQSRLQFSQAGASDIQDQSRNWLPGPCYRQQRVSKTSADNNNSEYSWTGATKYHLNGRDSLVNPGPAMASHKDDEEKFFPQSGVLIFGKQGSEKTNVDIEKVMITDEEEIRTTNPVATEQYGSVSTNLQSGNTQAATADVNTQGVLPGMVGQDRDVYLQGPTWAKIPHTDGHFHPSPLMGGFGLKHPPPQILIKNTPVPANPSTTFSAAKFASFITQYSTGQVSVEIEWELQKENSKRWNPEIQYTSNYNKSVNVDFTVDTNGVYSEPRPIGTRYLTRNL

SEQ ID NO: 4848 - DNA, 2208 bp, Adeno-associated virus
  source 1..2208: mol_type = genomic DNA
atggctgccgatggttatcttccagattggctcgaggacactctctctgaaggaataagacagtggtggaagctcaaacctggcccaccaccaccaaagcccgcagagcggcataaggacgacagcaggggtcttgtgcttcctgggtacaagtacctcggacccttcaacggactcgacaagggagagccggtcaacgaggcagacgccgcggccctcgagcacgacaaggcctacgaccggcagctcgacagcggagacaacccgtacctcaagtacaaccacgccgacgcagagtttcaggagcgccttaaagaagatacgtcttttgggggcaacctcggacgagcagtcttccaggcaaaaaagagggttctggaacctctgggcctggttgaggagcctgttaagacggctccgggaaaaaagaggccggtagagcactctcctgcagagccagattcctcctccggaactggaaagtcgggcaaccagcctgcaagaaagagattgaatttcggtcagactggagactcagactccgtacctgacccccagcctctcggacagccaccagcagccccctctggtctgggaactaatacgatggctacaggcagtggcgcaccaatggcagacaataacgagggcgccgacggagtgggtaattcctcgggaaattggcattgcgattccacatggatgggcgacagagtcatcaccaccagcacccgaacctgggccctgcccacctacaacaaccatctgtacaagcaaatatccagccagtctggagccagcaacgacaatcactactttggctacagcaccccctgggggtattttgacttcaacagattccactgccacttttcaccacgtgactggcaaagactcatcaacaacaactggggattccgacccaagagactcaacttcaagctctttaacattcaagtcaaagaggtcacgcagaatgacggtacgacgacgattgccaataaccttaccagcacggttcaggtgtttactgactcggagtaccagctcccgtacgtcctcggctcggcgcatcaaggatgcctcccgccgttcccagcagacgtcttcatggtgccacagtatggatacctcaccctgaacaacgggagtcaggcagtaggacgctcttcattttactgcctagggtactttccttctcagatgctgcgtaccggaaacaactttaccttcagctacacctttgaggacgttcctttccacagcagctacgctcacagccagagtttggaccgtctcatgaatcctctcatcgaccagtacctgtattacttgagcagaacaaacactccaagcggaaccaccacgcagtccaggcttcagttttctcaggccggagcgagtgacattcgggaccagtctaggaactggcttcctggaccctgttaccgtcagcagcgagtatcaaagacatctgcggataacaacaacagtgaatactcgtggactggagctaccaagtaccacctcaatggcagagactctctggtgaatccgggcccggccatggccagccacaaagacgatgaagaaaagttttttcctcagagcggggttcttatctttgggaagcaaggcccagagaaaacaaatgtggatattgaaaaggtcatgattacagacgaagaggaaatcaggaccaccaatcccgtggctacggagcagtatggttctgtatctaccaacctccagagcggcaacacacaagcagctaccgcagatgtcaacacacaaggcgttcttccaggcatggtctggcaagacagagacgtgtacctgcaggggcctatttgggcaaagattccacacacggacggacattttcacccctctcccctcatgggcggatttggacttaaacaccctcctccacagattctcatcaagaacaccccggtacctgcgaatccttcgaccaccttcagtgcggcaaagtttgcttccttcattacacagtactccacggggcaggtcagcgtggagatcgagtgggagctgcagaaggagaacagcaaacgctggaatcccgagatccagtacacttccaactacaacaagtctgttaatgtggactttactgtggacactaatggcgtgtattcagagcctcgccccattggcaccagatacctgactcgtaatctgtaa

SEQ ID NO: 4849 - protein, 735 aa, Adeno-associated virus
MAADGYLPDWLEDTLSEGIRQWWKLKPGPPPPKPAERHKDDSRGLVLPGYKYLGPFNGLDKGEPVNEADAAALEHDKAYDRQLDSGDNPYLKYNHADAEFQERLKEDTSFGGNLGRAVFQAKKRVLEPLGLVEEPVKTAPGKKRPVEHSPAEPDSSSGTGKSGNQPARKRLNFGQTGDSDSVPDPQPLGQPPAAPSGLGTNTMATGSGAPMADNNEGADGVGNSSGNWHCDSTWMGDRVITTSTRTWALPTYNNHLYKQISSQSGASNDNHYFGYSTPWGYFDFNRFHCHFSPRDWQRLINNNWGFRPKRLNFKLFNIQVKEVTQNDGTTTIANNLTSTVQVFTDSEYQLPYVLGSAHQGCLPPFPADVFMVPQYGYLTLNNGSQAVGRSSFYCLGYFPSQMLRTGNNFTFSYTFEDVPFHSSYAHSQSLDRLMNPLIDQYLYYLSRTNTPSGTTTQSRLQFSQAGASDIRDQSRNWLPGPCYRQQRVSKTSADNNNSEYSWTGATKYHLNGRDSLVNPGPAMASHKDDEEKFFPQSGVLIFGKQGPEKTNVDIEKVMITDEEEIRTTNPVATEQYGSVSTNLQSGNTQAATADVNTQGVLPGMVWQDRDVYLQGPIWAKIPHTDGHFHPSPLMGGFGLKHPPPQILIKNTPVPANPSTTFSAAKFASFITQYSTGQVSVEIEWELQKENSKRWNPEIQYTSNYNKSVNVDFTVDTNGVYSEPRPIGTRYLTRNL

SEQ ID NO: 4850 - protein, 735 aa, Adeno-associated virus
MAADGYLPDWLEDTLSEGIRQWWKLKPGPPPPKPAERHKDDSRGLVLPGYKYLGPFNGLDKGEPVNEADAAALEHDKAYDRQLDSGDNPYLKYNHADAEFQERLKEDTSFGGNLGRAVFQAKKRVLEPLGLVEEPVKTAPGKKRPVEHSPAEPDSSSGTGKSGNQPARKRLNFGQTGDSDSVPDPQPLGQPPAAPSGLGTNTMATGSGAPMADNNEGADGVGNSSGNWHCDSTWMGDRVITTSTRTWALPTYNNHLYKQISSQSGASNDNHYFGYSTPWGYFDFNRFHCHFSPRDWQRLINNNWGFRPKRLNFKLFNIQVKEVTQNDGTTTIANNLTSTVQVFTDSEYQLPYVLGSAHQGCLPPFPADVFMVPQYGYLTLNNGSQAVGRSSFYCLEYFPSQMLRTGNNFTFSYTFEDVPFHSSYAHSQSLDRLMNPLIDQYLYYLSRTNTPSGTTTQSRLQFSQAGASDIRDQSRNWLPGPCYRQQRVSKTSADNNNSEYSWTGATKYHLNGRDSLVNPGPAMASHKDDEEKFFPQSGVLIFGKQGPEKTNVDIEKVMITDEEEIRTTNPVATEQYGSVSTNLQSGNTQAATADVNTQGVLPGMVWQDRDVYLQGPIWAKIPHTDGHFHPSPLMGGFGLKHPPPQILIKNTPVPANPSTTFSAAKFASFITQYSTGQVSVEIEWELQKENSKRWNPEIQYTSNYNKSVNVDFTVDTNGVYSEPRPIGTRYLTRNL

SEQ ID NO: 4851 - protein, 735 aa, Adeno-associated virus; identical to SEQ ID NO: 4850

SEQ ID NO: 4852 - DNA, 2211 bp, Adeno-associated virus
  source 1..2211: mol_type = genomic DNA
atggctgccgatggttatcttccagattggctcgaggacactctctctgaaggaataagacagtggtggaagctcaaacctggcccaccaccaccaaagcccgcagagcggcataaggacgacagcaggggtcttgtgcttcctgggtacaagtacctcggacccttcaacggactcgacaagggggagccggtcaacgaggcagacgccgcggccctcgagcacgacaaggcctacgaccggcagctcgacagcggagacaacccgtacctcaagtacaaccacgccgacgcagagtttcaggagcgccttaaagaagatacgtcttttgggggcaacctcggacgagcagtcttccaggcgaaaaagagggttcttgaacctctgcggcctggtttgaggaaacctgttaagacggctccgggaaaaaagaggccggtagagcactctcctgtggagccagactcctcctcgggaaccggaaaagcgggccagcagcctgcaagaaaaagattaaattttggtcagactggagacgcagactccgtacctgacccccagcctctcggacagccaccagcagccccctctggtctgggatctactacaatggctacaggcagtggcgcaccaatggcagacaataacgagggtgccgatggagtgggtaattcctcaggaaattggcattgcgattcccaatggctggacgacagagtcatcgccaccagcacccgaacctgggccctgcccacatacaacaaccacctctacaagcaaatctccagccaatcaggagcctgcaacgacaaccactactttggctacagcaccccctgggggtattttgacttcaacagattccactgccacttttcaccacgtgactggcaaagactcatcaacagcaactggggattccggcccaaaagactcaacttcaagctctttaatattcaagtcaaagaggtcacgcagaatgacggtacgacgacgattgccaataaccttaccagcacggttcaggtgtttactgactcggagtaccagctcccgtacgtcccgggctcggcgcatcaaggatgcctcccgccgtttccagcggacgtcttcatggtcccacagtatggatacctcaccctgaacaacgggagtcaggcggtaggacgctcttccttttactgcctggagtactttccttctcagatgctgcgtactggaaacaactttcagttcagctacacttttgaagacgtgcctttccacagcagctacgctcactgccagagtctggatcggctgatgaatcctctgatcgaccagtacctgtattatctgaacaagacacaaacaaatagtggaactcttcagcagtctcggctactgtttagccaagctggaccaaccaacatgtctcttcaagctaaaaactggctgcctggaccttgctacagacagcagcgtctgtcaaaacaggcaaacgacaataacaactgcaactttccctggactgcagctacaaagtatcatctaaatggccgggactcgttggttaatccaggaccagctatggccagtcacaaggatgacgaagaaaagtttttccccatgcatggaaccctgatatttggtaaacaaggaacaaatgccaacgacgcggatttggaaaatgtcatgattacagatgaagaagaaatcaggcccaccaatcccgtggctacggagcagtacgggactgtgtcaaataatttgcaaaactcaaacactggtccaactacaggaactgtcaatcaccaaggagcgttacctggtatggtgtggcaggatcgagacgtgtacctgcagggacccatttgggccaagattcctcacaccgatggacactttcatccttctccactgatgggaggttttggactcaaacacccgcctcctcagatcatgatcaaaagcactcccgttccagccaatcctcccacaaacttcagttctgccaagtttgcttcttccatcacacagtattccacgggacaggtcagcgtggagatcgagtgggagctgcagaaggagaacagcaaacgctggaatcccgaaattcagtacacttccaactacaacaagtctgttaatgtggactttactgtggacactaatggtgtgtattcagagcctcgccccattggcaccagatacctgactcgtaatctgtaa

SEQ ID NO: 4853 - protein, 736 aa, Adeno-associated virus
MAADGYLPDWLEDTLSEGIRQWWKLKPGPPPPKPAERHKDDSRGLVLPGYKYLGPFNGLDKGEPVNEADAAALEHDKAYDRQLDSGDNPYLKYNHADAEFQERLKEDTSFGGNLGRAVFQAKKRVLEPLRPGLRKPVKTAPGKKRPVEHSPVEPDSSSGTGKAGQQPARKRLNFGQTGDADSVPDPQPLGQPPAAPSGLGSTTMATGSGAPMADNNEGADGVGNSSGNWHCDSQWLDDRVIATSTRTWALPTYNNHLYKQISSQSGACNDNHYFGYSTPWGYFDFNRFHCHFSPRDWQRLINSNWGFRPKRLNFKLFNIQVKEVTQNDGTTTIANNLTSTVQVFTDSEYQLPYVPGSAHQGCLPPFPADVFMVPQYGYLTLNNGSQAVGRSSFYCLEYFPSQMLRTGNNFQFSYTFEDVPFHSSYAHCQSLDRLMNPLIDQYLYYLNKTQTNSGTLQQSRLLFSQAGPTNMSLQAKNWLPGPCYRQQRLSKQANDNNNCNFPWTAATKYHLNGRDSLVNPGPAMASHKDDEEKFFPMHGTLIFGKQGTNANDADLENVMITDEEEIRPTNPVATEQYGTVSNNLQNSNTGPTTGTVNHQGALPGMVWQDRDVYLQGPIWAKIPHTDGHFHPSPLMGGFGLKHPPPQIMIKSTPVPANPPTNFSSAKFASSITQYSTGQVSVEIEWELQKENSKRWNPEIQYTSNYNKSVNVDFTVDTNGVYSEPRPIGTRYLTRNL

SEQ ID NO: 4854 - DNA, 2208 bp, Adeno-associated virus
  source 1..2208: mol_type = genomic DNA
atggctgccgatggttatcttccagattggctcgaggacactctctctgaaggaataagacagtggtggaagctcaaacctggcccaccaccaccaaagcccgcagagcggcataaggacgacagcaggggtcttgtgcttcctgggtacaagtacctcggacccttcaacggactcgacaagggagagccggtcaacgaggcagacgccgcggccctcgagcacgacaaggcctacgaccggcagctcgacagcggagacaacccgtacctcaagtacaaccacgccgacgcggagtttcaggagcgccttaaagaggatacgtcttttgggggcaacctcggacgagcagtcttccaggcaaaaaagagggttctggaacctctgggcctggttgaggagcctgttaagacggctccgggaaaaaagaggccggtagagcactctcctgcagagccagattcctcctccggaactggaaagtcgggcaaccagcctgcaagaaagagattgaatttcggtcagactggagactcagactccgtacctgacccccagcctctcggacagccaccagcagccccctctggtctgggaactaatacgatggctacaggcagtggcgcaccaatggcagacaataacgagggcgccgacggagtgggtaattcctcgggaaattggcattgcgattccacatggatgggcgacagagtcatcaccaccagcacccgaacctgggccctgcccacctacaacaaccatctgtacaagcaaatatccagccagtctggagccagcaacgacaatcactactttggctacagcaccccctgggggtattttgacttcaacagattccactgccacttttcaccacgtgactggcaaagactcatcaacaacaactggggattccgacccaagagactcaacttcaagctctttaacattcaagtcaaagaggtcacgcagaatgacggtacgacgacgattgccaataaccttaccagcacggttcaggtgtttactgactcggagtaccagctcccgtacgtcctcggctcggcgcatcaaggatgcctcccgccgttcccagcagacgtcttcatggtgccacagtatggatacctcaccctgaacaacgggagtcaggcagtaggacgctcttcattttactgcctagagtactttccttctcagatgctgcgtaccggaaacagctttaccttcagctacacctttgaggacgttcctttccacagcagctacgctcacagccagagtttggaccgtctcatgaatcctctcatcgaccagtacctgtattacttgagcagaacaaacactccaagcggaaccaccacgcagtccaggcttcagttttctcaggccggagcgagtgacattcgggaccagtctaggaactggcttcctggaccctgttaccgtcagcagcgagtatcaaagacatctgcggataacaacaacagtgaatactcgtggactggagctaccaagtaccacctcaatggcagagactctctggtgaatccgggcccggccatggccagccacaaagacgatgaagaaaagttctttcctcagagcggggttcttatctttgggaagcaaggctcagagaaaacaaatgtggatattgaaaaggtcatgattacagacgaagaggaaatcaggaccaccaatcccgtggctacggagcagtatggttctgtatctaccaacctccagagcggcaacacacaagcagctaccgcagatgtcaacacacaaggcgttcttccaggcatggtctggcaagacagagacgtgtacctgcaggggcctatttgggcaaagattccacacacggacggacattttcacccctctcccctcatgggcggatttggacttaaacaccctcctccacagattctcatcaagaacaccccggtacctgcgaatccttcgaccaccttcagtgcggcaaagtttgcttccttcattacacagtactccacggggcaggtcagcgtggagatcgagtgggagctgcagaaggagaacagcaaacgctggaatcccgagatccagtacacttccaactacaacaagtctgttaatgtggactttactgtggacactaatggcgtgtattcagagcctcgccccattggcaccagatacctgactcgtaatctgtaa

SEQ ID NO: 4855 - protein, 735 aa, Adeno-associated virus
MAADGYLPDWLEDTLSEGIRQWWKLKPGPPPPKPAERHKDDSRGLVLPGYKYLGPFNGLDKGEPVNEADAAALEHDKAYDRQLDSGDNPYLKYNHADAEFQERLKEDTSFGGNLGRAVFQAKKRVLEPLGLVEEPVKTAPGKKRPVEHSPAEPDSSSGTGKSGNQPARKRLNFGQTGDSDSVPDPQPLGQPPAAPSGLGTNTMATGSGAPMADNNEGADGVGNSSGNWHCDSTWMGDRVITTSTRTWALPTYNNHLYKQISSQSGASNDNHYFGYSTPWGYFDFNRFHCHFSPRDWQRLINNNWGFRPKRLNFKLFNIQVKEVTQNDGTTTIANNLTSTVQVFTDSEYQLPYVLGSAHQGCLPPFPADVFMVPQYGYLTLNNGSQAVGRSSFYCLEYFPSQMLRTGNSFTFSYTFEDVPFHSSYAHSQSLDRLMNPLIDQYLYYLSRTNTPSGTTTQSRLQFSQAGASDIRDQSRNWLPGPCYRQQRVSKTSADNNNSEYSWTGATKYHLNGRDSLVNPGPAMASHKDDEEKFFPQSGVLIFGKQGSEKTNVDIEKVMITDEEEIRTTNPVATEQYGSVSTNLQSGNTQAATADVNTQGVLPGMVWQDRDVYLQGPIWAKIPHTDGHFHPSPLMGGFGLKHPPPQILIKNTPVPANPSTTFSAAKFASFITQYSTGQVSVEIEWELQKENSKRWNPEIQYTSNYNKSVNVDFTVDTNGVYSEPRPIGTRYLTRNL

SEQ ID NO: 4856 - DNA, 2211 bp, Adeno-associated virus; identical to SEQ ID NO: 4767
  source 1..2211: mol_type = genomic DNA

SEQ ID NO: 4857 - protein, 736 aa, Adeno-associated virus
MAADGYLPDWLEDTLSEGIRQWWKLKPGPPPPKPAERHKDDSRGLVLPGYKYLGPGNGLDKGEPVNAADAAALEHDKAYDQQLKAGDNPYLKYNHADAEFQERLKEDTSFGGNLGRAVFQAKKRLLEPLGLVEEAAKTAPGKKRPVEQSPQEPDSSAGIGKSGSQPAKKKLNFGQTGDTESVPDPQPIGEPPAAPSGVGSLTMASGGGAPVADNNEGADGVGSSSGNWHCDSQWLGDRVITTSTRTWALPTYNNHLYKQISNSTSGGSSNDNAYFGYSTPWGYFDFNRFHCHFSPRDWQRLINNNWGFRPKRLNFKLFNIQVKEVTDNNGVKTIANNLTSTVQVFTDSDYQLPYVLGSAHEGCLPPFPADVFMIPQYGYLTLNDGGQAVGRSSFYCLEYFPSQMLRTGNNFQFSYEFENVPFHSSYAHSQSLDRLMNPLIDQYLYYLSKTINGSGQNQQTLKFSVAGPSNMAVQGRNYIPGPSYRQQRVSTTVTQNNNSEFAWPGASSWALNGRNSLMNPGPAMASHKEGEDRFFPLSGSLIFGKQGTGRDNVDADKVMITNEEEIKTTNPVATESYGQVATNHQSAQAQAQTGWVQNQGILPGMVWQDRDVYLQGPIWAKIPHTDGNFHPSPLMGGFGMKHPPPQILIKNTPVPADPPTAFNKDKLNSFITQYSTGQVSVEIEWELQKENSKRWNPEIQYTSNYYKSNNVEFAVSTEGVYSEPRPIGTRYLTRNL

SEQ ID NO: 4858 - DNA, 2211 bp, Adeno-associated virus
  source 1..2211: mol_type = genomic DNA
atggctgccgatggttatcttccagattggctcgaggacactctctctgaaggaataagacagtggtggaagctcaaacctggcccaccaccaccaaagcccgcagagcggcataaggacgacagcaggggtcttgtgcttcctgggtacaagtacctcggacccggcaacggactcgacaagggggagccggtcaacgcagcagacgcggcggccctcgagcacgacaaggcctacgaccagcagctcaaggccggagacaacccgtacctcaagtacaaccacgccgacgccgagttccaggagcggctcaaagaagatacgtcttttgggggcaacctcgggcgagcagtcttccaggccaaaaagaggcttcttgaacctcttggtctggttgaggaagcggctaagacggctcctggaaagaagaggcctgtagagcagtctcctcaggaaccggactcctccgcgggtattggcaaatcgggttcacagcccgctaaaaagaaactcaatttcggtcagactggcgacacagagtcagtccccgaccctcaaccaatcggagaacctcccgcagccccctcaggtgtgggatctcttacaatggcttcaggtggtggcgcaccagtggcagacaataacgaaggtgccgatggagtgggtagttcctcgggaaattggcattgcgattcccaatggctgggggacagagtcatcaccaccagcacccgaacctgggccctgcccacctacaacaatcacctctacaagcaaatctccaacagcacatctggaggatcttcaaatgacaacgcctacttcggctacagcaccccctgggggtattttgacttcaacagattccactgccacttctcaccacgtgactggcagcgactcatcaacaacaactggggattccggcctaagcgactcaacttcaagctcttcaacattcaggtcaaagaggttacggacaacaatggagtcaagaccatcgccaataaccttaccagcacggtccaggtcttcacggactcagactatcagctcccgtacgtgctcgggtcggctcacgagggctgcctcccgccgttcccagcggacgttttcatgattcctcagtacgggtatctgacgcttaatgatgggagccaggccgtgggtcgttcgtccttttactgcctggaatatttcccgtcgcaaatgctaagaacgggtaacaacttccagttcagctacgagtttgagaacgtacctttccatagcagctacgctcacagccaaagcctggaccgactaatgaatccactcatcgaccaatacttgtactatctctcaaagactattaacggttctggacagaatcaacaaacgctaaaattcagcgtggccggacccagcaacatggctgtccagggaagaaactacatacctggacccagctaccgacaacaacgtgtctcaaccactgtgactcaaaacaacaacagcgaatttgcttggcctggagcttcttcttgggctctcaatggacgtaatagcttgatgaatcctggacctgctatggccagccacaaagaaggagaggaccgtttctttcctttgtctggatctttaatttttggcaaacaaggaactggaagagacaacgtggatgcggacaaagtcatgataaccaacgaagaagaaattaaaactactaacccggtagcaacggagtcctatggacaagtggccacaaaccaccagagtgcccaagcacaggcgcagaccggctgggttcaaaaccaaggaatacttccgggtatggtttggcaggacagagatgtgtacctgcaaggacccatttgggccaaaattcctcacacggacggcaactttcacccttctccgctaatgggagggtttggaatgaagcacccgcctcctcagatcctcatcaaaaacacacctgtacctgcggatcctccaacggctttcaataaggacaagctgaactctttcatcacccagtattctactggccaagtcagcgtggagattgagtgggagctgcagaaggaaaacagcaagcgctggaacccggagatccagtacacttccaactattacaagtctaataatgttgaatttgctgttaatactgaaggtgtatatagtgaaccccgccccattggcaccagatacctgactcgtaatctgtaa

SEQ ID NO: 4859 - protein, 736 aa, Adeno-associated virus
MAADGYLPDWLEDTLSEGIRQWWKLKPGPPPPKPAERHKDDSRGLVLPGYKYLGPGNGLDKGEPVNAADAAALEHDKAYDQQLKAGDNPYLKYNHADAEFQERLKEDTSFGGNLGRAVFQAKKRLLEPLGLVEEAAKTAPGKKRPVEQSPQEPDSSAGIGKSGSQPAKKKLNFGQTGDTESVPDPQPIGEPPAAPSGVGSLTMASGGGAPVADNNEGADGVGSSSGNWHCDSQWLGDRVITTSTRTWALPTYNNHLYKQISNSTSGGSSNDNAYFGYSTPWGYFDFNRFHCHFSPRDWQRLINNNWGFRPKRLNFKLFNIQVKEVTDNNGVKTIANNLTSTVQVFTDSDYQLPYVLGSAHEGCLPPFPADVFMIPQYGYLTLNDGSQAVGRSSFYCLEYFPSQMLRTGNNFQFSYEFENVPFHSSYAHSQSLDRLMNPLIDQYLYYLSKTINGSGQNQQTLKFSVAGPSNMAVQGRNYIPGPSYRQQRVSTTVTQNNNSEFAWPGASSWALNGRNSLMNPGPAMASHKEGEDRFFPLSGSLIFGKQGTGRDNVDADKVMITNEEEIKTTNPVATESYGQVATNHQSAQAQAQTGWVQNQGILPGMVWQDRDVYLQGPIWAKIPHTDGNFHPSPLMGGFGMKHPPPQILIKNTPVPADPPTAFNKDKLNSFITQYSTGQVSVEIEWELQKENSKRWNPEIQYTSNYYKSNNVEFAVNTEGVYSEPRPIGTRYLTRNL

SEQ ID NO: 4860 - DNA, 2208 bp, Adeno-associated virus
  source 1..2208: mol_type = genomic DNA
atggctgccgatggttatcttccagattggctcgaggacactctctctgaaggaataagacagcggtggaagctcaaacctggcccaccaccaccagagcccgcagagcggcataaggacgacagcaggggtcttgtgcttcctgggtacaagtacctcggacccttcaacggactcgacaagggagagccggtcaacgaggcagacgccgcggccctcgagcacgacaaagcctacgaccggcagctcgacagcggagacaacccgtacctcaagtacaaccacgccgacgcggagtttcaggagcgccttaaagaagatacgtcttttgggggcaacctcggacgagcagtcttccaggcgaaaaagagggtacttgaacctctgggcctggttgaggaacctgttaagacggctccgggaaaaaagaggccggtagagcactctcctgtggagccagactcctcctcgggaaccggaaaggcgggccagcagcctgcaagaaaaagattgaattttggtcagactggagacgcagactcagtacctgacccccagcctctcggacagccaccagcagccccctctggtctgggaactaatacgatggctacaggcagtggcgcaccaatggcagacaataacgagggcgccgacggagtgggtaattcctcgggaaattggcattgcgattccacatggatgggcgacagagtcatcaccaccagcacccgaacctgggccctgcccacctacaacaaccacctctacaaacaaatttccagccaatcaggagcctcgaacgacaatcactactttggctacagcaccccttgggggtattttgacttcaacagattccactgccacttttcaccacgtgactggcaaagactcatcaacaacaactggggattccgacccaagagactcaacttcaagctctttaacattcaagtcaaagaggtcacgcagaatgacggtacgacgacgattgccaataaccttaccggcacggttcaggtgtttactgactcggagtaccagctcccgtacgtcctcggctcggcgcatcaaggatgcctcccgccgttcccagcagacgtcttcatggtgccacagtatggatacctcaccctgaacaacgggagtcaggcagtaggacgctcttcattttactgcctggagtactttccttctcagatgctgcgtaccggaaacaactttaccttcagctacacttttgaggacgttcctttccacagcagctacgctcacagccagagtctgggccgtctcatgaatcctctcatcgaccagtacctgtattacttgagcagaacaaacactccaagtggaaccaccacgcagtcaaggcttcagttttctcaggccggagcgagtgacattcgggaccagtctaggaactggcttcctggaccctgttaccgccagcagcgagtatcaaagacatctgcggataacaacaacagtgaatactcgtggactggagctaccaagtaccacctcaatggcagagactctctggtgaatccgggcccggccatggcaagccacaaggacgatgaagaaaagttttttcctcagagcggggttctcatctttgggaagcaaggctcagagaaaacaaatgtggacattgaaaaggtcatgattacagacgaagaggaaatcaggacaaccaatcccgtggctacggagcagtatggttctgtatctaccaacctccagagaggcaacagacaagcagctaccgcagatgtcaacacacaaggcgttcttccaggcatggtctggcaggacagagatgtgtaccttcaggggcccatctgggcaaagattccacacacggacggacattttcacccctctcccctcatgggtggattcggacttaaacaccctcctccacagattctcatcaagaacaccccggtacctgcgaatccttcgaccaccttcagtgcggcaaagtttgcttccttcatcacacagtactccacgggacaggtcagcgtggagatcgagtgggagctgcagaaggaaaacagcaaacgctggaatcccgaaattcagtacacttccaactacaacaagtctgttaatgtggactttactgtggacactaatggcgtgtattcagagcctcgccccattggcaccagatacctgactcgtaatctgtaa

SEQ ID NO: 4861 - protein, 735 aa, Adeno-associated virus
MAADGYLPDWLEDTLSEGIRQRWKLKPGPPPPEPAERHKDDSRGLVLPGYKYLGPFNGLDKGEPVNEADAAALEHDKAYDRQLDSGDNPYLKYNHADAEFQERLKEDTSFGGNLGRAVFQAKKRVLEPLGLVEEPVKTAPGKKRPVEHSPVEPDSSSGTGKAGQQPARKRLNFGQTGDADSVPDPQPLGQPPAAPSGLGTNTMATGSGAPMADNNEGADGVGNSSGNWHCDSTWMGDRVITTSTRTWALPTYNNHLYKQISSQSGASNDNHYFGYSTPWGYFDFNRFHCHFSPRDWQRLINNNWGFRPKRLNFKLFNIQVKEVTQNDGTTTIANNLTGTVQVFTDSEYQLPYVLGSAHQGCLPPFPADVFMVPQYGYLTLNNGSQAVGRSSFYCLEYFPSQMLRTGNNFTFSYTFEDVPFHSSYAHSQSLGRLMNPLIDQYLYYLSRTNTPSGTTTQSRLQFSQAGASDIRDQSRNWLPGPCYRQQRVSKTSADNNNSEYSWTGATKYHLNGRDSLVNPGPAMASHKDDEEKFFPQSGVLIFGKQGSEKTNVDIEKVMITDEEEIRTTNPVATEQYGSVSTNLQRGNRQAATADVNTQGVLPGMVWQDRDVYLQGPIWAKIPHTDGHFHPSPLMGGFGLKHPPPQILIKNTPVPANPSTTFSAAKFASFITQYSTGQVSVEIEWELQKENSKRWNPEIQYTSNYNKSVNVDFTVDTNGVYSEPRPIGTRYLTRNL

SEQ ID NO: 4862 - DNA, 2208 bp, Adeno-associated virus
  source 1..2208: mol_type = genomic DNA
atggctgccgatggttatcttccagattggctcgaggacactctctctgaaggaataagacagcggtggaagctcaaacctggcccaccaccaccagagcccgcagagcggcataaggacgacagcaggggtcttgtgcttcctgggtacaagtacctcggacccttcaacggactcgacaagggagagccggtcaacgaggcagacgccgcggccctcgagcacgacaaagcctacgaccggcagctcgacagcggagacaacccgtacctcaagtacaaccacgccgacgcggagtttcaggagcgccttaaagaagatacgtcctttgggggcaacctcggacgagcagtcttccaggcgaaaaagagggtacttgaacctctgggcctggttgaggaacctgttaagacggctccgggaaaaaagaggccggtagagcactctcctgtggagccagactcctcctcgggaaccggaaaggcgggccagcagcctgcaagaaaaagattgaattttggtcagactggagacgcagactcagtacctgacccccagcctctcggacagccaccagcagccccctctggtctgggaactaatacgatggctacaggcagtggcgcaccaatggcagacaataacgagggcgccgacggagtgggtaattcctcgggaaattggcattgcgattccacatggatgggcgacagagtcatcaccaccagcacccgaacctgggccctgcccacctacaacaaccacctctacaaacaaatttccagccaatcaggagcctcgaacgacaatcactactttggctacagcaccccttgggggtattttgacttcaacagattccactgccacttttcaccacgtgactggcaaagactcatcaacaacaactggggattccgacccaagagactcaacttcaagctctttaacattcaagtcaaagaggtcacgcagaatgacggtacgacgacgattgccaataaccttaccagcacggttcaggtgtttactgactcggagtaccagctcccgtacgtcctcggctcggcgcatcaaggatgcctcccgccgttcccagcagacgtcttcatggtgccacagtatggatacctcaccctgaacaacgagagtcaggcagtaggacgctcttcattttactgcctggagtactttccttctcagatgctgcgtaccggaaacaactttaccttcagctacacttttgaggacgttcctttccacagcagctacgctcacagccagagtctgggccgtctcatgaatcctctcatcgaccagtacctgtattacttgagcagaacaaacactccaagtggaaccaccacgcagtcaaggcttcagttttctcaggccggagcgagtgacattcgggaccagtctaggaactggcttcctggaccctgttaccgccagcagcgagtatcaaagacatctgcggataacaacaacagtgaatactcgtggactggagctaccaagtaccacctcaatggcagagactctctggtgaatccgggcccggccatggcaagccacaaggacgatgaagaaaagttttttcctcagagcggggttctcatctttgggaagcaaggctcagagaaaacaaatgtggacattgaaaaggtcatgattacagacgaagaggaaatcaggacaaccaatcccgtggctacggagcagtatggttctgtatctaccaacctccagagaggcaacagacaagcagctaccgcagatgtcaacacacaaggcgttcttccaggcatggtctggcaggacagagatgtgtaccttcaggggcccatctgggcaaagattccacacacggacggacattttcacccctctcccctcatgggtggattcggacttaaacaccctcctccacagattctcatcaagaacaccccggtacctgcgaatccttcgaccaccttcagtgcggcaaagtttgcttccttcatcacacagtactccacgggacaggtcagcgtggagatcgagtgggagctgcagaaggaaaacagcaaacgctggaatcccgaaattcagtacacttccaactacaacaagtctgttaatgtggactttactgtggacactaatggcgtgtattcagagcctcgccccattggcaccagatacctgactcgtaatctgtaa

SEQ ID NO: 4863 - protein, 735 aa, Adeno-associated virus
MAADGYLPDWLEDTLSEGIRQRWKLKPGPPPPEPAERHKDDSRGLVLPGYKYLGPFNGLDKGEPVNEADAAALEHDKAYDRQLDSGDNPYLKYNHADAEFQERLKEDTSFGGNLGRAVFQAKKRVLEPLGLVEEPVKTAPGKKRPVEHSPVEPDSSSGTGKAGQQPARKRLNFGQTGDADSVPDPQPLGQPPAAPSGLGTNTMATGSGAPMADNNEGADGVGNSSGNWHCDSTWMGDRVITTSTRTWALPTYNNHLYKQISSQSGASNDNHYFGYSTPWGYFDFNRFHCHFSPRDWQRLINNNWGFRPKRLNFKLFNIQVKEVTQNDGTTTIANNLTSTVQVFTDSEYQLPYVLGSAHQGCLPPFPADVFMVPQYGYLTLNNESQAVGRSSFYCLEYFPSQMLRTGNNFTFSYTFEDVPFHSSYAHSQSLGRLMNPLIDQYLYYLSRTNTPSGTTTQSRLQFSQAGASDIRDQSRNWLPGPCYRQQRVSKTSADNNNSEYSWTGATKYHLNGRDSLVNPGPAMASHKDDEEKFFPQSGVLIFGKQGSEKTNVDIEKVMITDEEEIRTTNPVATEQYGSVSTNLQRGNRQAATADVNTQGVLPGMVWQDRDVYLQGPIWAKIPHTDGHFHPSPLMGGFGLKHPPPQILIKNTPVPANPSTTFSAAKFASFITQYSTGQVSVEIEWELQKENSKRWNPEIQYTSNYNKSVNVDFTVDTNGVYSEPRPIGTRYLTRNL

SEQ ID NO: 4864 - DNA, 2208 bp, Adeno-associated virus
  source 1..2208: mol_type = genomic DNA
atggctgccgatggttatcttccagattggctcgaggacactctctctgaaggaataagacagcggtggaagctcaaacctggcccaccaccaccagagcccgcagagcggcataaggacgacagcaggggtcttgtgcttcctgggtacaagtacctcggacccttcaacggactcgacaagggagagccggtcaacgaggcagacgccgcggccctcgagcacgacaaagcctacgaccggcagctcgacagcggagacaacccgtacctcaagtacaaccacgccgacgcggagtttcaggagcgccttaaagaagatacgtcttttgggggcaacctcggacgagcagtcttccaggcgaaaaagagggtacttgaacctctgggcctggttgaggaacctgttaagacggctccgggaaaaaagaggccggtagagcactctcctgtggagccagactcctcctcgggaaccggaaaggcgggccagcagcctgcaagaaaaagattgaattttggtcagactggagacgcagactcagtacctgacccccagcctctcggacagccaccagcagccccctctggtctgggaactaatacgatggctacaggcagtggcgcaccaatggcagacaataacgagggcgccgacggagtgggtaattcctcgggaaattggcattgcgattccacatggatgggcgacagagtcatcaccaccagcacccgaacctgggccctgcccacctacaacaaccacctctacaaacaaatttccagccaatcaggagcctcgaacgacaatcactactttggctacagcaccccttgggggtattttgacttcaacagattccactgccacttttcaccacgtgactggcaaagactcatcaacaacaactggggattccgacccaagagactcaacttcaagctctttaacattcaagtcaaagaggtcacgcagaatgacggtacgacgacgattgccaataaccttaccagcacggttcaggtgtttactgactcggagtaccagctcccgtacgtcctcggctcggcgcatcaaggatgcctcccgccgttcccagcagacgtcttcatggtaccacagtatggatacctcaccctgaacaacgggagtcaggcagtaggacgctcttcattttactgcctggagtactttccttctcagatgctgcgtaccggaaacaactttaccttcagctacacttttgaggacgttcctttccacagcagctacgctcacagccagagtctgggccgtctcatgaatcctctcatcgaccagtacctgtattacttgagcagaacaaacactccaagtggaaccaccacgcagtcaaggcttcagttttctcaggccggagcgagtgacattcgggaccagtctaggaactggcttcctggaccctgttaccgccagcagcgagtatcaaagacatctgcggataacaacaacagtgaatactcgtggactggagctaccaagtaccacctcaatggcagagactctctggtgaatccgggcccggccatggcaagccacaaggacgatgaagaaaagttttttcctcagagcggggttctcatctttgggaagcaaggctcagagaaaacaaatgtggacattgaaaaggtcatgattacagacgaagaggaaatcaggacaaccaatcccgtggctacggagcagtatggttctgtatctaccaacctccagagaggcaacagacaagcagctaccgcagatgtcaacacacaaggcgttcttccaggcatggtctggcaggacagagatgtgtaccttcaggggcccatctgggcaaagattccacacacggacggacattttcacccctctcccctcatgggtggattcggacttaaacaccctcctccacagattctcatcaagaacaccccggtacctgcgaatccttcgaccaccttcagtgcggcaaagtttgcttccttcatcacacagtactccacgggacaggtcagcgtggagatcgagtgggagctgcagaaggaaaacagcaaacgctggaatcccgaaattcagtacacttccaactacaacaagtctgttaatgtggactttactgtggacactaatggcgtgtattcagagcctcgccccattggcaccagatacctgactcgtaatctgtaa

SEQ ID NO: 4865 - protein, 735 aa, Adeno-associated virus
MAADGYLPDWLEDTLSEGIRQRWKLKPGPPPPEPAERHKDDSRGLVLPGYKYLGPFNGLDKGEPVNEADAAALEHDKAYDRQLDSGDNPYLKYNHADAEFQERLKEDTSFGGNLGRAVFQAKKRVLEPLGLVEEPVKTAPGKKRPVEHSPVEPDSSSGTGKAGQQPARKRLNFGQTGDADSVPDPQPLGQPPAAPSGLGTNTMATGSGAPMADNNEGADGVGNSSGNWHCDSTWMGDRVITTSTRTWALPTYNNHLYKQISSQSGASNDNHYFGYSTPWGYFDFNRFHCHFSPRDWQRLINNNWGFRPKRLNFKLFNIQVKEVTQNDGTTTIANNLTSTVQVFTDSEYQLPYVLGSAHQGCLPPFPADVFMVPQYGYLTLNNGSQAVGRSSFYCLEYFPSQMLRTGNNFTFSYTFEDVPFHSSYAHSQSLGRLMNPLIDQYLYYLSRTNTPSGTTTQSRLQFSQAGASDIRDQSRNWLPGPCYRQQRVSKTSADNNNSEYSWTGATKYHLNGRDSLVNPGPAMASHKDDEEKFFPQSGVLIFGKQGSEKTNVDIEKVMITDEEEIRTTNPVATEQYGSVSTNLQRGNRQAATADVNTQGVLPGMVWQDRDVYLQGPIWAKIPHTDGHFHPSPLMGGFGLKHPPPQILIKNTPVPANPSTTFSAAKFASFITQYSTGQVSVEIEWELQKENSKRWNPEIQYTSNYNKSVNVDFTVDTNGVYSEPRPIGTRYLTRNL

SEQ ID NO: 4866 - DNA, 2208 bp, Adeno-associated virus
  source 1..2208: mol_type = genomic DNA
atggctgccgatggttatcttccagattggctcgaggacactctctctgaaggaataagacagcggtggaagctcaaacctggcccaccaccaccagagcccgcagagcggcataaggacgacagcaggggtcttgtgcttcctgggtacaagtacctcggacccttcaacggactcgacaagggagagccggtcaacgaggcagacgccgcggccctcgagcacgacaaagcctacgaccggcagctcgacagcggagacaacccgtacctcaagtacaaccacgccgacgcggagtttcaggagcgccttaaagaagatacgtcttttgggggcaacctcggacgagcagtcttccaggcgaaaaagagggtactcgaacctctgggcctggttgaggaacctgttaagacggctccgggaaaaaagaggccggtagagcactctcctgtggagccagactcctcctcgggaaccggaaaggcgggccagcagcctgcaagaaaaagattgaattttggtcagactggagacgcagactcagtacctgacccccagcctctcggacagccaccagcagccccctctggtctgggaactaatacgatggctacaggcagtggcgcaccaatggcagacaataacgagggcgccgacggagtgggtaattcctcgggaaattggcattgcgattccacatggatgggcgacagagtcatcaccaccagcacccgaacctgggccctgcccacctacaacaaccacctctacaaacaaatttccagccaatcaggagcctcgaacgacaatcactactttggctacagcaccccttgggggtattttgacttcaacagattccactgccacttttcaccacgtgactggcaaagactcatcaacaacaactggggattccgacccaagagactcaacttcaagctctttaacattcaagtcaaagaggtcacgcagaatgacggtacgacgacgattgccaataaccttaccagcacggttcaggtgtttactgactcggagtaccagctcccgtacgtcctcggctcggcgcatcaaggatgcctcccgccgttcccagcagacgtcttcatggtgccacagtatggatacctcaccctgaacaacgggagtcaggcagcaggacgctcttcattttactgcctggagtactttccttctcagatgctgcgtaccggaaacaactttaccttcagctacacttttgaggacgttcctttccacagcagctacgctcacagccagagtctgggccgtctcatgaatcctctcatcgaccagtacctgtattacttgagcagaacaaacactccaagtggaaccaccacgcagtcaaggcttcagttttctcaggccggagcgagtgacattcgggaccagtctaggaactggcttcctggaccctgttaccgccagcagcgagtatcaaagacatctgcggataacaacaacagtgaatactcgtggactggagctaccaagtaccacctcaatggcagagactctctggtgaatccgggcccggccatggcaagccacaaggacgatgaagaaaagttttttcctcagagcggggttctcatctttgggaagcaaggctcagagaaaacaaatgtggacattgaaaaggtcatgattacagacgaagaggaaatcaggacaaccaatcccgtggctacggagcagtatggttctgtatctaccaacctccagagaggcaacagacaagcagctaccgcagatgtcaacacacaaggcgttcttccaggcatggtctggcaggacagagatgtgtaccttcaggggcccatctgggcaaagattccacacacggacggacattttcacccctctcccctcatgggtggattcggacttaaacaccctcctccacagattctcatcaagaacaccccggtacctgcgaatccttcgaccaccttcagtgcggcaaagtttgcttccttcatcacacagtactccacgggacaggtcagcgtggagatcgagtgggagctgcagaaggaaaacagcaaacgctggaatcccgaaattcagtacacttccaactacaacaagtccgttaatgtggactttactgtggacactaatggcgtgtattcagagcctcgccccattggcaccagatacctgactcgtaatctgtaa

SEQ ID NO: 4867 - protein, 735 aa, Adeno-associated virus
MAADGYLPDWLEDTLSEGIRQRWKLKPGPPPPEPAERHKDDSRGLVLPGYKYLGPFNGLDKGEPVNEADAAALEHDKAYDRQLDSGDNPYLKYNHADAEFQERLKEDTSFGGNLGRAVFQAKKRVLEPLGLVEEPVKTAPGKKRPVEHSPVEPDSSSGTGKAGQQPARKRLNFGQTGDADSVPDPQPLGQPPAAPSGLGTNTMATGSGAPMADNNEGADGVGNSSGNWHCDSTWMGDRVITTSTRTWALPTYNNHLYKQISSQSGASNDNHYFGYSTPWGYFDFNRFHCHFSPRDWQRLINNNWGFRPKRLNFKLFNIQVKEVTQNDGTTTIANNLTSTVQVFTDSEYQLPYVLGSAHQGCLPPFPADVFMVPQYGYLTLNNGSQAAGRSSFYCLEYFPSQMLRTGNNFTFSYTFEDVPFHSSYAHSQSLGRLMNPLIDQYLYYLSRTNTPSGTTTQSRLQFSQAGASDIRDQSRNWLPGPCYRQQRVSKTSADNNNSEYSWTGATKYHLNGRDSLVNPGPAMASHKDDEEKFFPQSGVLIFGKQGSEKTNVDIEKVMITDEEEIRTTNPVATEQYGSVSTNLQRGNRQAATADVNTQGVLPGMVWQDRDVYLQGPIWAKIPHTDGHFHPSPLMGGFGLKHPPPQILIKNTPVPANPSTTFSAAKFASFITQYSTGQVSVEIEWELQKENSKRWNPEIQYTSNYNKSVNVDFTVDTNGVYSEPRPIGTRYLTRNL

SEQ ID NO: 4868 - protein, 738 aa, Adeno-associated virus; identical to SEQ ID NO: 4760

SEQ ID NO: 4869 - DNA, 2217 bp, Adeno-associated virus
  source 1..2217: mol_type = genomic DNA
atggctgctgacggttatcttccagattggctcgaggacaacctctctgagggcattcgcgagtggtgggacctgaaacctggagcccccaagcccaaggccaaccagcagaagcaggacgacggccggggtctggtgcttcctggctacaagtacctcggacccttcaacggactcgacaagggggagcccgtcaacgcggcggacgcagcggccctcgagcacgacaaggcctacgaccagcagctcaaagcgggtgacaatccgtacctgcggtataaccacgccgacgccgagtttcaggagcgtctgcaagaagatacgtcttttgggggcaacctcgggcgagcagtcttccaggccaagaagcgggttctcgaacctctcggtctggttgaggaagctgctaagacggctcctggaaagaagagaccggtagaaccgtcacctcagcgttcccccgactcctccacgggcatcggcaagaaaggccagcagcccgctaaaaagagactgaactttggtcagactggcgactcagagtcagtccccgaccctcaaccaatcggagaaccaccagcaggcccctctggtctgggatctggtacaatggctgcaggcggtggcgctccaatggcagacaataacgaaggcgccgacggagtgggtagttcctcaggaaattggcattgcgattccacatggctgggcgacagagtcatcaccaccagcacccgaacctgggccctgcccacctacaacaaccacctctacaagcaaatatccaatgggacatcgggaggaagcaccaacgacaacacctacttcggctacagcaccccctgggggtattttgacttcaacagattccactgccacttctcaccacgtgactggcagcgactcatcaacaacaactggggattccggccaaaaagactcagcttcaagctcttcaacatccaggtcaaggaggtcacgcagaatgaaggcaccaagaccatcgccaataaccttaccagcacgattcaggtatttacggactcggaataccagctgccgtacgtcctcggctccgcgcaccagggctgcctgcctccgttcccggcggacgtcttcatgattccccagtacggctaccttacactgaacaatggaagtcaagccgtaggccgttcctccttctactgcctggaatattttccatctcaaatgctgcgaactggaaacaattttgaattcagctacaccttcgaggacgtgcctttccacagcagctacgcacacagccagagcttggaccgactgatgaatcctctcatcgaccagtacctgtactacttatccagaactcagtccacaggaggaactcaaggtacccagcaattgttattttctcaagctgggcctgcaaacatgtcggctcaggctaagaactggctacctggaccttgctaccggcagcagcgagtctctacgacactgtcgcaaaacaacaacagcaactttgcttggactggtgccaccaaatatcacctgaacggaagagactctttggtaaatcccggtgtcgccatggcaacccacaaggacgacgaggaacgcttcttcccgtcgagtggagtcctgatgttcggaaaacagggtgctggaagagacaatgtggactacagcagcgttatgctaaccagcgaagaagaaattaaaaccactaaccccgtagccacagaacaatacggtgtggtggctgacaacttgcagcaaaccaatacagggcctattgtgggaaatgtcaacagccaaggagccttacctggcatggtctggcagaaccgagacgtgtacctgcagggtcccatctgggccaagattcctcacacggacggcaacttccacccttcaccgctaatgggaggatttggactgaagcacccacctcctcagatcctgatcaagaacacgccggtacctgcggatcctccaacaacgttcagccaggcgaaattggcttccttcattacgcagtacagcaccggacaggtcagcgtggaaatcgagtgggagctgcagaaggagaacagcaaacgctggaacccagagattcagtacacttcaaactactacaaatctacaaatgtggactttgctgtcaatacagagggaacttattctgagcctcgccccattggtactcgttacctcacccgtaatctgtaa

SEQ ID NO: 4870 - protein, 738 aa, Adeno-associated virus
MAADGYLPDWLEDNLSEGIREWWDLKPGAPKPKANQQKQDDGRGLVLPGYKYLGPFNGLDKGEPVNAADAAALEHDKAYDQQLKAGDNPYLRYNHADAEFQERLQEDTSFGGNLGRAVFQAKKRVLEPLGLVEEAAKTAPGKKRPVEPSPQRSPDSSTGIGKKGQQPAKKRLNFGQTGDSESVPDPQPIGEPPAGPSGLGSGTMAAGGGAPMADNNEGADGVGSSSGNWHCDSTWLGDRVITTSTRTWALPTYNNHLYKQISNGTSGGSTNDNTYFGYSTPWGYFDFNRFHCHFSPRDWQRLINNNWGFRPKRLSFKLFNIQVKEVTQNEGTKTIANNLTSTIQVFTDSEYQLPYVLGSAHQGCLPPFPADVFMIPQYGYLTLNNGSQAVGRSSFYCLEYFPSQMLRTGNNFEFSYTFEDVPFHSSYAHSQSLDRLMNPLIDQYLYYLSRTQSTGGTQGTQQLLFSQAGPANMSAQAKNWLPGPCYRQQRVSTTLSQNNNSNFAWTGATKYHLNGRDSLVNPGVAMATHKDDEERFFPSSGVLMFGKQGAGRDNVDYSSVMLTSEEEIKTTNPVATEQYGVVADNLQQTNTGPIVGNVNSQGALPGMVWQNRDVYLQGPIWAKIPHTDGNCHPSPLMGGFGLKHPPPQILIKNTPVPADPPTTFSQAKLASFITQYSTGQVSVEIEWELQKENSKRWNPEIQYTSNYYKSTNVDFAVNTEGTYSEPRPIGTRYLTRNL

SEQ ID NO: 4871 - protein, 738 aa, Adeno-associated virus
MAADGYLPDWLEDNLSEGIREWWDLKPGAPKPKANQQKQDDGRGLVLPGYKYLGPFNGLDKGEPVNAADAAALEHDKAYDQQLKAGDNPYLRYNHADAEFQERLQEDTSFGGNLGRAVFQAKKRVLEPLGLVEEGAKTAPGKKRPVEPSPQRSPDSSTGIGKKGQQPARKRLNFGRTGDSESVPDPQPIGEPPAAPSSVGSGTMAAGGGAPMADNNEGADGVGSSSGNWHCDSTWLGDRVITTSTRTWALPTYNNHLYKQISNGTSGGSTNDNTYFGYSTPWGYLDFNRFHCHFSPRDWQRLINNNWGFRPKRLSFKLFNIQVKEVTQNEGTKTIANNLASTIQVFTDSEYQPPYVLGSAHQGCLPPFPADVFMIPQYGYLTLNNGSQAVGRSSFYCLEYFPSQMLRTGNNFSFSYTFEDVPFHSSYAHSQSLDRLMNPLIDQYLYYLSRTQSTGGTAGTQQLLFSRAGPSNMSAQARNWLPGPCYRQQRVSTTLSQNNNSNFAWTGATKYHLNGRDSLVNPGVAMATNKDDEDRFFPSSGILMFGKQGAGKDNVDYSNVMLTSEEEIKTTNPVATEQYGVVADNLQQQNTAPTVGAVNSQGALPGMVWQNRDVYLQGPIWAKIPHTDGNFHPSPLMGGFGLKHPPPQILIKNTPVPADPPTAFNQAKLNSFIAQYSTGQVSVEIEWELQKENSKRWNPEIQYTSNYYKSTNADFAVNTEGVYSEPRPIGTRYLTRNL

SEQ ID NO: 4872 - DNA, 2217 bp, Adeno-associated virus
  source 1..2217: mol_type = genomic DNA
atggctgccgatggttatcttccagattggctcgaggacaacctctctgagggcattcgcgagtggtgggacctgaaacctggagccccgaaacccaaagccaaccagcaaaagcaggacgacggccggggtctggtgcttcctggctacaagtacctcggacccttcaacggactcgacaagggggagcccgtcaacgcggcggacgcagcggccctcgagcacgacaaggcctacgaccagcagctcaaagcgggtgacaatccgtacctgcggtataatcacgccgacgccgagtttcaggagcgtctgcaagaagatacgtcttttgggggcaacctcgggcgagcagtcttccaggccaagaagcgggttctcgaacctctcggtctggttgaggaaggcgctaagacggctcctggaaagaagagaccggtagagccgtcaccacagcgttcccccgactcctccacgggcatcggcaagaaaggccagcagcccgccagaaagagactcaatttcggtcggactggcgactcagagtcagtccccgaccctcaacctatcggagaacctccagcagcgccctctagtgtgggatctggtacaatggctgcaggcggtggcgcaccaatggcagacaataacgaaggtgccgacggagtgggtagttcctcgggaaattggcattgcgattccacatggctgggcgacagagttatcaccaccagcacccgaacctgggccctgcccacctacaacaaccacctctacaagcaaatctccaacgggacctcgggaggcagcaccaacgacaacacctactttggctacagcaccccctgggggtatcttgactttaacagattccactgccacttctcaccacgtgactggcagcgactcatcaacaacaactggggattccggcccaagagactcagcttcaagctcttcaacatccaggtcaaagaggtcacgcagaatgaaggcaccaagaccatcgccaataacctcgccagcaccatccaggtgtttacggactcggaataccagccgccgtacgtcctcggctctgcccaccagggctgcctgcctccgttcccggcggacgtcttcatgattcctcagtacggctacctgactctcaacaacggtagtcaggccgtgggacgttcctccttctactgcctggagtacttcccctctcagatgctgagaacgggcaacaacttttccttcagctacactttcgaggacgtgcctttccacagcagctacgcgcacagccagagtttggacaggctgatgaatcctctcatcgaccagtacctgtactacctgtcaagaacccagtctacgggaggcacagcgggaacccagcagttgctgttttctcgggccgggcctagcaacatgtcggctcaggccagaaactggctgcctggaccctgctacagacagcagcgcgtctccacgacactgtcgcaaaacaacaacagcaactttgcctggactggtgccaccaagtatcatctgaacggcagagactctctggtgaatccgggcgtcgccatggcaaccaacaaggacgacgaggaccgcttcttcccatccagcggcatcctcatgtttggcaagcagggagctggaaaagacaacgtggactatagcaacgtgatgctaaccagcgaggaagaaatcaagaccaccaaccccgtggccacagaacagtatggcgtggtggctgataacctacagcagcaaaacaccgctcctactgtgggggccgtcaacagccagggagccttacctggcatggtctggcagaaccgggacgtgtacctgcagggtcctatttgggccaagattcctcacacagatggcaactttcacccgtctcctttaatgggcggctttggacttaaacatccgcctcctcagatcctcatcaaaaacactcctgttcctgcggatcctccaacagcgttcaaccaggccaagctgaattctttcatcgcgcagtacagcaccggacaagtcagcgtggagatcgagtgggagctgcagaaggagaacagcaagcgctggaacccagagattcagtatacttccaactactacaaatctacaaatgcggactttgctgttaatactgagggtgtttactctgagcctcgccccattggcactcgttacctcacccgtaatctgtaa

SEQ ID NO: 4873 - DNA, 2208 bp, Adeno-associated virus
  source 1..2208: mol_type = genomic DNA
atggctgccgatggttatcttccagattggctcgaggacactctctctgaaggaataagacagtggtggaagctcaaacctggcccaccaccaccaaagcccgcagagcggcataaggacgacagcaggggtcttgtgcttcctgggtacaagtacctcggacccttcaacggactcgacaagggggagccggtcaacgaggcagacgccgcggccctcgagcacgacaaggcctacgaccggcagctcgacagcggagacaacccgtacctcaagtacaaccacgccgacgcagagtttcaggagcgccttaaagaagatacgtcttttgggggcaacctcggacgagcagtcttccaggcgaaaaagagggttcttgaacctctgggcctggttgaggagcctgttaagacggctccgggaaaaaagaggccggtagagcactctcctgtggagccagactcctcctcgggaaccggaaaagcgggccagcagcctgcaagaaaaagattaaattttggtcagactggagacgcagactccgtacctgacccccagcctctcggacagccaccagcagccccctctggtctgggatctactacaatggctacaggcagtggcgcaccaatggcagacaataacgagggtgccgatggagtgggtaattcctcaggaaattggcattgcgattcccaatggctgggcgacagagtcatcaccaccagcacccgaacctgggccctgcccacatacaacaaccacctctacaagcaaatctccagccaatcaggagccagcaacgacaaccactactttggctacagcaccccctgggggtattttgacttcaacagattccactgccacttttcaccacgtgactggcaaagactcgtcaacaacaaccggggattccggcccaaaagactcaacttcaagctctttaatattcaagtcaaagaggtcacgcagaatgacggtacgacgacgattgccaataaccttaccagcacggttcaggtgtttactgactcggagtaccagctcccgtacgtcctgggctcggcgcatcaaggatgcctcccgccgtttccagcggacgtcttcatggtcccacagtatggatacctcaccctgaacaacgggagtcaggcggtaggacgctcttccttttactgcctggagtactttccttctcagatgctgcgtactggaaacaactttcagttcagctacacttttgaagacgtgcctttccacagcagctacgctcacagccagagtctggatcggctgatgaatcctctgatcgaccagtacctgtattatctgaacaagacacaaacaaatagtggaactcttcagcagtctcggctactgtttagccaagctggaccaaccaacatgtctcttcaagctaaaaactggctgcctggaccttgctacagacagcagcgtctgtcaaaacaggcaaacgacaacaacaacagcaactttccctggactgcagctacaaagtatcatctaaatggccgggactcgttggttaatccaggaccagctatggccagtcacaaggatgacgaagaaaagtttttccccatgcatggaaccctgatatttggtaaacaaggaacaaatgccaacgacgcggatttggaaaatgtcatgattacagatgaagaagaaatcagggccaccaatcccgtggctacggagcagtacgggactgtgtcaaataatttgcaaaactcaaacactggtccaactactggaactgtcaatcaccaaggagcgttacctggtatggtgtggcaggatcgagacgtgtacctgcagggacccatttgggccaagattcctcacaccgatggacactttcatccttctccactgatgggaggttttggactcaaacacccgcctcctcagatcatgatcaaaaacactcccgttccagccaatcctcccacaaacttcagttctgccaagtttgcttctttcatcacacagtattccacgggacaggtcagcgtggagatcgagtgggagctgcagaaggagaacagcaaacgctggaatcccgaaattcagtacacttccaactacaacaagtctgttaatgtggactttactgtggacactaatggtgtgtattcagagcctcgccccattggcaccagatacctgactcgtaatctgtaa

SEQ ID NO: 4874 - protein, 735 aa, Adeno-associated virus
MAADGYLPDWLEDTLSEGIRQWWKLKPGPPPPKPAERHKDDSRGLVLPGYKYLGPFNGLDKGEPVNEADAAALEHDKAYDRQLDSGDNPYLKYNHADAEFQERLKEDTSFGGNLGRAVFQAKKRVLEPLGLVEEPVKTAPGKKRPVEHSPVEPDSSSGTGKAGQQPARKRLNFGQTGDADSVPDPQPLGQPPAAPSGLGSTTMATGSGAPMADNNEGADGVGNSSGNWHCDSQWLGDRVITTSTRTWALPTYNNHLYKQISSQSGASNDNHYFGYSTPWGYFDFNRFHCHFSPRDWQRLVNNNRGFRPKRLNFKLFNIQVKEVTQNDGTTTIANNLTSTVQVFTDSEYQLPYVLGSAHQGCLPPFPADVFMVPQYGYLTLNNGSQAVGRSSFYCLEYFPSQMLRTGNNFQFSYTFEDVPFHSSYAHSQSLDRLMNPLIDQYLYYLNKTQTNSGTLQQSRLLFSQAGPTNMSLQAKNWLPGPCYRQQRLSKQANDNNNSNFPWTAATKYHLNGRDSLVNPGPAMASHKDDEEKFFPMHGTLIFGKQGTNANDADLENVMITDEEEIRATNPVATEQYGTVSNNLQNSNTGPTTGTVNHQGALPGMVWQDRDVYLQGPIWAKIPHTDGHFHPSPLMGGFGLKHPPPQIMIKNTPVPANPPTNFSSAKFASFITQYSTGQVSVEIEWELQKENSKRWNPEIQYTSNYNKSVNVDFTVDTNGVYSEPRPIGTRYLTRNL

SEQ ID NO: 4875 - protein, 738 aa, Adeno-associated virus
MAADGYLPDWLEDNLSEGIREWWDLKPGAPKPKANQQKQDDGRGLVLPGYKYLGPFNGLDKGEPVNAADAAALEHDKAYDQQLKAGDNPYLRYNHADAEFQERLQEDTSFGGNLGRAVFQAKKRVLEPLGLVEEAAKTAPGKKRPVEPSPQRSPDSSTGIGKKGQQPAKKRLSFGQTGDSESVPDPQPIGEPPAGPSGLGSGTMAAGGGAPMADNNEGADGVGSSSGNWHCDSTWLGDRVITTSTRTWALPTYNNHLYKQISNGTSGGSTNDNTYFGYSTPWGYFDFNRFHCHFSPRDWQRLINNNWGFRPKRLSFKLFNIQVKEVTQNEGTKTIANNLTSTIQVFTDSEYQLPYVLGSAHQGCLPPFPADVFMIPQYGYLTLNNGSQAVGRSSFYCLEYFPSQMLRTGNNSEFSYTFEDVPFHSSYAHSQSLDRLMNPLIDQYLYYLSRTQSTGGTQGTQQLLFSQAGPANMSAQAKNWLPGPCYRQQRVSTTLSQNNNSNFAWTGATKYHLNGRDSLVNPGVAMATHKDDEERFFPSSGVLMFGKQGAGRDNVDYSSVMLTSEEEIKTTNPVATEQYGVVADNLQQTNTGPIVGNVNSQGALPGMVWQNRDVYLQGPIWAKIPHTDGNFHPSPLMGGFGLKHPPPQILIKNTPVPADPPTTFSQAKLASFITQYSTGQVSVEIEWELQKENSKRWNPEIQYTSNYYKSTNVDFAVNTEGTYSEPRPIGTRYLTRNL

SEQ ID NO: 4876 - DNA, 2217 bp, Adeno-associated virus
  source 1..2217: mol_type = genomic DNA
atggctgctgacggttatcttccagattggctcgaggacaacctctctgagggcattcgcgagtggtgggacctgaaacctggagcccccaagcccaaggccaaccagcagaagcaggacgacggccggggtctggtgcttcctggctacaagtacctcggacccttcaacggactcgacaagggggagcccgtcaacgcggcggacgcagcggccctcgagcacgacaaggcctacgaccagcagctcaaagcgggtgacaatccgtacctgcggtataaccacgccgacgccgagtttcaggagcgtctgcaagaagatacgtcttttgggggcaacctcgggcgagcagtcttccaggccaagaagcgggttctcgaacctctcggtctggttgaggaagctgctaagacggctcctggaaagaagagaccggtagaaccgtcacctcagcgttcccccgactcctccacgggcatcggcaagaaaggccagcagcccgctaaaaagagactgagctttggtcagactggcgactcagagtcagtccccgaccctcaaccaatcggagaaccaccagcaggcccctctggtctgggatctggtacaatggctgcaggcggtggcgctccaatggcagacaataacgaaggcgccgacggagtgggtagttcctcaggaaattggcattgcgattccacatggctgggcgacagagtcatcaccaccagcacccgaacctgggccctgcccacctacaacaaccacctctacaagcaaatatccaatgggacatcgggaggaagcaccaacgacaacacctacttcggctacagcaccccctgggggtattttgacttcaacagattccactgccacttctcaccacgtgactggcagcgactcatcaacaacaactggggattccggccaaaaagactcagcttcaagctcttcaacatccaggtcaaggaggtcacgcagaatgaaggcaccaagaccatcgccaataaccttaccagcacgattcaggtatttacggactcggaataccagctgccgtacgtcctcggctccgcgcaccagggctgcctgcctccgttcccggcggacgtcttcatgattccccagtacggctaccttacactgaacaatggaagtcaagccgtaggccgttcctccttctactgcctggaatattttccatctcaaatgctgcgaactggaaacaattctgaattcagctacaccttcgaggacgtgcctttccacagcagctacgcacacagccagagcttggaccgactgatgaatcctctcatcgaccagtacctgtactacttatccagaactcagtccacaggaggaactcaaggtacccagcaattgttattttctcaagctgggcctgcaaacatgtcggctcaggctaagaactggctacctggaccttgctaccggcagcagcgagtctctacgacactgtcgcaaaacaacaacagcaactttgcttggactggtgccaccaaatatcacctgaacggaagagactctttggtaaatcccggtgtcgccatggcaacccacaaggacgacgaggaacgcttcttcccgtcgagtggagtcctgatgtttggaaaacagggtgctggaagagacaatgtggactacagcagcgttatgctaaccagcgaagaagaaattaaaaccactaaccctgtagccacagaacaatacggtgtggtggctgacaacttgcagcaaaccaatacagggcctattgtgggaaatgtcaacagccaaggagccttacctggcatggtctggcagaaccgagacgtgtacctgcagggtcccatctgggccaagattcctcacacggacggcaacttccacccttcaccgctaatgggaggatttggactgaagcacccacctcctcagatcctgatcaagaacacgccggtacctgcggatcctccaacaacgttcagccaggcgaaattggcttccttcattacgcagtacagcaccggacaggtcagcgtggaaatcgagtgggagctgcagaaggagaacagcaaacgctggaacccagagattcagtacacttcaaactactacaaatctacaaatgtggactttgctgtcaatacagagggaacttattctgagcctcgccccattggtactcgttacctcacccgtaatctgtaa

SEQ ID NO: 4877 - protein, 738 aa, Adeno-associated virus
MAADGYLPDWLEDNLSEGIREWWDLKPGAPKPKANQQKQDDGRGLVLPGYKYLGPFNGLDKGEPVNAADAAALEHDKAYDQQLKAGDNPYLRYNHADAEFQERLQEDTSFGGNLGRAVFQAKKRVLEPLGPVEEAAKTAPGKKRPVEPPPQRSPDSSTGIGKKGQQPAKKRLNFGQTGDSESVPDPQPIGEPPAGPSGLGSGTMAAGGGAPMADNNEGADGVGSSSGNWHCDSTWLGDRVITTSTRTWALPTYNNHLYKQISNGTSGGSTNDNTYFGYSTPWGYFDFNRFHCHFSPRDWQRLINNNWGFRPKRLSFKLFNIQVKEVTQNEGTKTVANNLTSTIQVFTDSEYQLPYVLGSAHQGCLPPFPADVFMIPQYGYLTLNNGSQAVGRSSFYCLEYFPSQMLRTGNNFEFSYTFEDVPFHSSYAHSQSLDRLMNPLIDQYLYYLSRTQSTGGTQGTQQLLFSQAGPANMSAQAKNWLPGPCYRQQRVSTTLSQNNNSNFAWTGATKYHLNGRDSLVNPGVAMATHKDDEERFFPSSGVLMFGKQGAGRDNVDYSSVMLTSEEEIKTTNPVATEQYGVVADNLQQTNTGPIVGNVNSQGALPGMVWQNRDVYLQGPIWAKIPHTDGNFHPSPLMGGFGLKHPPPQILIKNTPVPADPPTTFSQAKLASFITQYSTGQVSVEIEWELQKENSKRWNPEIQYTSNYYKSTNVDFAVNTEGTYSEPRPIGTRYLTRNL

SEQ ID NO: 4878 - DNA, 2217 bp, Adeno-associated virus
  source 1..2217: mol_type = genomic DNA
atggctgctgacggttatcttccagattggctcgaggacaacctctctgagggcattcgcgagtggtgggacctgaaacctggagcccccaagcccaaggccaaccagcagaagcaggacgacggccggggtctggtgcttcctggctacaagtacctcggacccttcaacggactcgacaagggggagcccgtcaacgcggcggacgcagcggccctcgagcacgacaaggcctacgaccagcagctcaaagcgggtgacaatccgtacctgcggtataaccacgccgacgccgagtttcaggagcgtctacaagaagatacgtcttttgggggcaacctcgggcgagcagtcttccaggccaagaagcgggttctcgaacctctcggtccggttgaggaagctgctaagacggctcctggaaagaagagaccggtagaaccgccacctcagcgttcccccgactcctccacgggcatcggcaagaaaggccagcagcccgctaaaaagagactgaactttggtcagactggcgactcagagtcagtccccgaccctcaaccaatcggagaaccaccagcaggcccctctggtctgggatctggtacaatggctgcaggcggtggcgctccaatggcagacaataacgaaggcgccgacggagtgggtagttcctcaggaaattggcattgcgattccacatggctgggcgacagagtcatcaccaccagcacccgaacctgggccctgcccacctacaacaaccacctctacaagcaaatatccaatgggacatcgggaggaagcaccaacgacaacacctacttcggctacagcaccccctgggggtattttgacttcaacagattccactgccacttctcaccacgtgactggcagcgactcatcaacaacaactggggattccggccaaaaagactcagcttcaagctcttcaacatccaggtcaaggaggtcacgcagaatgaaggcaccaagaccgtcgccaataaccttaccagcacgattcaggtatttacggactcggaataccagctgccgtacgtcctcggctccgcgcaccagggctgcctgcctccgttcccggcggacgtcttcatgattccccagtacggctaccttacactgaacaatggaagtcaagccgtaggccgttcctccttctactgcctggaatattttccatctcaaatgctgcgaactggaaacaattttgaattcagctacaccttcgaggacgtgcctttccacagcagctacgcacacagccagagcttggaccgactgatgaatcctctcatcgaccagtacctgtactacttatccagaactcagtccacaggaggaactcaaggtacccagcaattgttattttctcaagctgggcctgcaaacatgtcggctcaggctaagaactggctacctggaccttgctaccggcagcagcgagtctctacgacactgtcgcaaaacaacaacagcaactttgcttggactggtgccaccaaatatcacctgaacggaagagactctttggtaaatcccggtgtcgccatggcaacccacaaggacgacgaggaacgcttcttcccgtcgagtggagtcctgatgtttggaaaacagggtgctggaagagacaatgtggactacagcagcgttatgctaaccagcgaagaagaaattaaaaccactaaccctgtagccacagaacaatacggtgtggtggctgacaacttgcagcaaaccaatacagggcctattgtgggaaatgtcaacagccaaggagccttacctggcatggtctggcagaaccgagacgtgtacctgcagggtcccatctgggccaagattcctcacacggacggcaacttccacccttcaccgctaatgggaggatttggactgaagcacccacctcctcagatcctgatcaagaacacgccggtacctgcggatcctccaacaacgttcagccaggcgaaattggcttccttcattacgcagtacagcaccggacaggtcagcgtggaaatcgagtgggagctgcagaaggagaacagcaaacgttggaacccagagattcagtacacttcaaactactacaaatctacaaatgtggactttgctgtcaatacagagggaacttattctgagcctcgccccattggtactcgttacctcacccgtaatctgtaa

SEQ ID NO: 4879 - protein, 738 aa, Adeno-associated virus
MAADGYLPDWLEDNLSEGIREWWDLKPGAPKPKANQQKQDDGRGLVLPGYKYLGPFNGLDKGEPVNAADAAALEHDKAYDQQLKAGDNPYLRYNHADAEFQERLQEDTSFGGNLGRAVFQAKKRVLEPLGLVEEAAKTAPGKKRPVEPSPQRSPDSSTGIGKKGQQPAKKRLNFGQTGDSESVPDPQPIGEPPAGPSGLGSGTMAAGGGAPMADNNEGADGVGSSSGNWHCDSTWLGDRVITTSTRTWALPTYNNHLYKQISNGTSGGSTNDNTYFGYSTPWGYFDFNRFHCHFSPRDWQRLINNNWGFRPKRLSFKLFNIQVKEVTQNEGTKTIANNLTSTIQVFTDSEYQLPYVLGSAHQGCLPPFPADVFMIPQYGYLTLNNGSQAVGRSSFYCLEYFPSQMLRTGNNFEFSYTFEDVPFHSSYAHSQSLDRLMNPLIDQYLYYLSRTQSTGGTQGTQQLLFSQAGPANMSAQAKNWLPGPCYRQQRVSTTLSQSNNSNFAWTGATKYHLNGRDSLVNPGVAMATHKDDEERFFPSSGVLMFGKQGAGRDNVDYSSVMLTSEEEIKTTNPVATEQYGVVADNLQQTNTGPIVGNVNSQGALPGMVWQNRDVYLQGPIWAKIPHTDGNFHPSPLMGGLGLKHPPPQILIKNTPVPADPPTTFSQAKLASFITQYSTGQVSVEIEWELQKENSKRWNPEIQYTSNYYKSTNVDFAVNTEGTYSEPRPIGTRYLTRNL

SEQ ID NO: 4880 - DNA, 2217 bp, Adeno-associated virus
  source 1..2217: mol_type = genomic DNA
atggctgctgacggttatcttccagattggctcgaggacaacctctctgagggcattcgcgagtggtgggacctgaaacctggagcccccaagcccaaggccaaccagcagaagcaggacgacggccggggtctggtgcttcctggctacaagtacctcggacccttcaacggactcgacaagggggagcccgtcaacgcggcggacgcagcggccctcgagcacgacaaggcctacgaccagcagctcaaagcgggtgacaatccgtacctgcggtataaccacgccgacgccgagtttcaggagcgtctgcaagaagatacgtcttttgggggcaacctcgggcgagcagtcttccaggccaagaagcgggttctcgaacctctcggtctggttgaggaagcggctaagacggctcctggaaagaagagaccggtagaaccgtcacctcagcgttcccccgactcctccacgggcatcggcaagaaaggccagcagcccgctaaaaagagactgaactttggtcagactggcgactcagagtcagtccccgaccctcaaccaatcggagaaccaccagcaggcccctctggtctgggatctggtacaatggctgcaggcggtggcgctccaatggcagacaataacgaaggcgccgacggagtgggtagttcctcaggaaattggcattgcgattccacatggctgggcgacagagtcatcaccaccagcacccgaacctgggccctgcccacctacaacaaccacctctacaagcaaatatccaatgggacatcgggaggaagcaccaacgacaacacctacttcggctacagcaccccctgggggtattttgacttcaacagattccactgccacttctcaccacgtgactggcagcgactcatcaacaacaactggggattccggccaaaaagactcagcttcaagctcttcaacatccaggtcaaggaggtcacgcagaatgaaggcaccaagaccatcgccaataaccttaccagcacgattcaggtatttacggactcggaataccagctgccgtacgtcctcggctccgcgcaccagggctgcctgcctccgttcccggcggacgtcttcatgattccccagtacggctaccttacactgaacaatggaagtcaagccgtaggccgttcctccttctactgcctggaatattttccatctcaaatgctgcgaactggaaacaattttgaattcagctacaccttcgaggacgtgcctttccacagcagctacgcacacagccagagcttggaccgactgatgaatcctctcatcgaccagtacctgtactacttatccagaactcagtccacaggaggaactcaaggtacccagcaattgttattttctcaagctgggcctgcaaacatgtcggctcaggctaagaactggctacctggaccttgctaccggcagcagcgagtctctacgacactgtcgcaaagcaacaacagcaactttgcttggactggtgccaccaaatatcacctgaacggaagagactctttggtaaatcccggtgtcgccatggcaacccacaaggacgacgaggaacgcttcttcccgtcgagtggagtcctgatgtttggaaaacagggtgctggaagagacaatgtggactacagcagcgttatgctaaccagcgaagaagaaattaaaaccactaaccctgtagccacagaacaatacggtgtggtggctgacaacttgcagcaaaccaatacagggcctattgtgggaaatgtcaacagccaaggagccttacctggcatggtctggcagaaccgagacgtgtacctgcagggtcccatctgggccaagattcctcacacggacggcaacttccacccttcaccgctaatgggaggacttggactgaagcacccacctcctcagatcctgatcaagaacacgccggtacctgcggatcctccaacaacgttcagccaggcgaaattggcttccttcattacgcagtacagcaccggacaggtcagcgtggaaatcgagtgggagctgcagaaggagaacagcaaacgctggaacccagagattcagtacacttcaaactactacaaatctacaaatgtggactttgctgtcaatacagagggaacttattctgagcctcgccccattggtactcgttacctcacccgtaatctgtaa

SEQ ID NO: 4881 - protein, 737 aa, Adeno-associated virus
MAADGYLPDWLEDNLSEGIREWWDLKPGAPKPKANQQKQDDGRGLVLPGYKYLGPFNGLDKGEPVNAADAAALEHDKAYDQQLKAGDNPYPRYNHADAEFQERLQEDTPFGGNLGRAVFQAKKRVLEPLGLVEEAAKTAPGKKRPVEPSPQRSPDSSTGIGKKGQQPAKKRLNFGQTGDSESVPDPQPIGEPPAGPSGLGSGTMAAGGGAPMADNNEGADGVGNASGNWHCDSTWLGDRVITTSTRTWALPTYNNHLYKQISSASTGASNDNHYFGYSTPWGYFDFNRFHCHFSPRDWQRLINNNWGFRPKRLNFKLFNIQVKEVTTNDGVTTIANNLTSTVQVFSDSEYQLPYVLGSAHQGCLPPFPADVFMIPQYGYLTLNNGSQAVGRSSFYCLEYFPSQMLRTGNNFTFSYTFEEVPLHSSYAHSQSLDRLMNPLIVQYLYYLNRTQNQSGSAQNKDLLFSRGSPAGMSVQPKNWLPGPCYRQQRVSKTKTDNNNSNFTWTGASKYNLNGRESIINPGTAMASHKDDEDKFFPMSGVMIFGKESAGASNTALDNVMITDEEEIKATNPVATERFGTVAVNFQSSSTDPATGDVHAMGALPGMVWQDRDVYLQGPIWAKIPHTDGHFHPSPLMGGFGLKNPPPQILIKNTPVPANPPAEFSATKFASFITQYSTGQVSVEIEWELQKENSKRWNPEVQYTSNYAKSASVDFTVDNNGLYTEPRPIGTRYLTRPL

SEQ ID NO: 4882 - protein, 737 aa, Adeno-associated virus
MAADGYLPDWLEDNLSEGIREWWDLKPGAPKPKANQQKQDDGRGLVLPGYKYLGPFNGLDKGEPVNAADAAALEHDKAYDQQLKAGDNPYPRYNHADAEFQERLQEDTSFGGNLGRAVFQAKKRVLEPLGLVEEAAKTAPGKKRPVEPSPQRSPDSSTGIGKKGQQPAKKRLNFGQTGDSESVPDPQPIGEPPAGPSGLGSGTMAAGGGAPMADNNEGADGVGNASGNWHCDSTWLGDRVITTSTRTWALPTYNNHLYKQISSASTGASNDNHYFGYSTPWGYFDFNRFHCHFSPRDWQRLINNNWGFRPKRLNFKLFNIQVKEVTTNDGVTTIANNLTSTVQVFSDSEYQLPYVLGSAHQGCLPPFPADVFMIPQYGYLTLNNGSQAVGRSSFYCLEYFPSQMLRTGNNFTFSYTFEEVPLHSSYAHSQSLDRLMNPLIDQYLYYLNRTQNQSGSAQNKDLLFSRGSPAGMSVQPKNWLPGPCYRQQRVSKTKTDNNNSNFTWTGASKYNLNGRESIINPGTAMASHKDDEDKFFPMSGVMIFGKESAGASNTALDNVMITDEEEIKATNPVATERFGTVAVNFQSSSTDPATGDVHAMGALPGMVWQDRDVYLQGPIWAKIPHTDGHFHPSPLMGGFGLKNPPPQILIKNTPVPANPPAEFSATKFASFITQYSTGQVSVEIEWELQKENSKRWNPEVQYTSNYAKSASVDFTVDNNGLYTEPRPIGTRYLTRPL

SEQ ID NO: 4883 - DNA, 2214 bp, Adeno-associated virus
  source 1..2214: mol_type = genomic DNA
atggctgctgacggttatcttccagattggctcgaggacaacctctctgagggcattcgcgagtggtgggacctgaaacctggagcccccaagcccaaggccaaccagcagaagcaggacgacggccggggtctggtgcttcctggctacaagtacctcggacccttcaacggactcgacaagggggagcccgtcaacgcggcggacgcagcggccctcgagcacgacaaggcctacgaccagcagctcaaagcgggtgacaatccgtacccgcggtataaccacgccgacgccgagtttcaggagcgtctgcaagaagatacgccttttgggggcaacctcgggcgagcagtcttccaggccaagaagcgggttctcgaacctctcggtctggttgaggaagctgctaagacggctcctggaaagaagagaccggtagaaccgtcacctcagcgttcccccgactcctccacgggcatcggcaagaaaggccagcagcccgctaaaaagagactgaactttggtcagactggcgactcagagtcagtccccgaccctcaaccaatcggagaaccaccagcaggcccctctggtctgggatctggtacaatggctgcaggcggtggcgctccaatggcagacaataacgaaggcgccgacggagtgggtaatgcctcaggaaattggcattgcgattccacatggctgggcgacagagtcatcaccaccagcacccgcacctgggccttgcccacctacaataaccacctctacaagcaaatctccagtgcttcaacgggggccagcaacgacaaccactacttcggctacagcaccccctgggggtattttgatttcaacagattccactgccacttttcaccacgtgactggcagcgactcatcaacaacaattggggattccggcccaagagactcaacttcaaactcttcaacatccaagtcaaggaggtcacgacgaatgatggcgtcacaaccatcgctaataaccttaccagcacggttcaagtcttctcggactcggagtaccagcttccgtacgtcctcggctctgcgcaccagggctgcctccctccgttcccggcggacgtgttcatgattccgcaatacggctacctgacgctcaacaatggcagccaagccgtgggacgttcatccttttactgcctggaatatttcccttctcagatgctgagaacgggcaacaactttaccttcagctacacctttgaggaagtgcctctccacagcagctacgcgcacagccagagcctggaccggctgatgaatcctctcatcgtccaatacctgtattacctgaacagaactcaaaatcagtccggaagtgcccaaaacaaggacttgctgttcagccgtgggtctccagctggcatgtctgttcagcccaaaaactggctacctggaccctgttatcggcagcagcgcgtttctaaaacaaaaacagacaacaacaacagcaattttacctggactggtgcttcaaaatataacctcaatgggcgtgaatccatcatcaaccctggcactgctatggcctcacacaaagacgacgaagacaagttctttcccatgagcggtgtcatgatttttggaaaagagagcgccggagcttcaaacactgcattggacaatgtcatgattacagacgaagaggaaattaaagccactaaccctgtggccaccgaaagatttgggaccgtggcagtcaatttccagagcagcagcacagaccctgcgaccggagatgtgcatgctatgggagcattacctggcatggtgtggcaagatagagacgtgtacctgcagggtcccatttgggccaaaattcctcacacagatggacactttcacccgtctcctcttatgggcggctttggactcaagaacccgcctcctcagatcctcatcaaaaacacgcctgttcctgcgaatcctccggcggagttttcagctacaaagtttgcttcattcatcacccaatactccacaggacaagtgagtgtggaaattgaatgggagctgcagaaagaaaacagcaagcgctggaatcccgaagtgcagtacacatccaattatgcaaaatctgccagcgttgattttactgtggacaacaatggactttatactgagcctcgccccattggcacccgttaccttacccgtcccctgtaa

SEQ ID NO: 4884 - protein, 736 aa, Adeno-associated virus
MAADGYLPDWLEDTLSEGIRQWWKLRPGPPPPKPAERHKDDSRGLVLPGYKYLGPFNGLDKGEPVNEADAAALEHDKAYDRQLDSGDNPYLKYNHADAEFQERLKEDTSFGGNLGRAVFQAKKRVLEPLGLVEEGAETAPGKKRPVEQSPQGPDSSSGIGKTGQQPAKKRLNFGQTGDSESVPDPQPLGEPPATPAAVGPTTMASGGGAPMADNNEGADGVGNASGNWHCDSTWLGDRVITTSTRTWALPTYNNHLYKQISSASTGASNDNHYFGYSTPWGYFDFNRFHCHFSPRDWQRLINNNWGFRPKRLNFKLFNIQVKEVTTNDGVTTIANNLTSTVQVFSDSEYQLPYVLGSAHQGCLPPFPADVFMIPQYGYLTLNNGSQAVGRSSFYCLEYFPSQMLRTGNNFTFSYTFEEVPFHSSYAHSQSLDRLMNPLIDQYLYYPNRTQNQSGSAQNKDLLFSRGSPAGMSVQPKNWLPGPCYRQQRVSKTKTDNNNSNFTWTGASKYNLNGRESIINPGTAMASHKDDEDKFFPMSGVMIFGKESAGASNTALDNVMITDEEEIKATNPVATERFGTVAVNFQSSSTDPATGDVHAMGALPGMVWQGRDVYLQGPIWAKIPHTDGHFHPSPLMGGFGLKNPPPQILIKNTPVPANPPAEFSATKFASFITQYSTGQVSVEIEWELQKENSKRWNPEVQYTSNYAKSANVDFTVDNNGLYTEPRPIGTRYLTRPL

SEQ ID NO: 4885 - DNA, 2211 bp, Adeno-associated virus
  source 1..2211: mol_type = genomic DNA
atggctgccgatggttatcttccagattggctcgaggacactctctctgaaggaataagacagtggtggaagctcagacctggcccaccaccaccaaagcccgcagagcggcataaggacgacagcaggggtcttgtgcttcctgggtacaagtacctcggacccttcaacggactcgacaagggagagccggtcaacgaggcagacgccgcggccctcgagcacgacaaagcctacgaccggcagctcgacagcggagacaacccgtacctcaagtacaaccacgccgacgcggagtttcaggagcgccttaaagaagatacgtcttttgggggcaacctcgggcgagcagtcttccaggccaagaagcgggttctcgaacctctcggtctggttgaggaaggcgctgagacggctcctggaaagaaacgtccggtagagcagtcgccacaagggccagactcctcctcgggcatcggcaagacaggccagcagcccgctaaaaagagactcaattttggtcagactggcgactcagagtcagtccccgatccacaacctctcggagaacctccagcaacccccgctgctgtgggacctactacaatggcttcaggcggtggcgcaccaatggcagacaataacgaaggcgccgacggagtgggtaatgcctcaggaaattggcattgcgattccacatggctgggcgacagagtcatcaccaccagcacccgcacctgggccttgcccacctacaataaccacctctacaagcaaatctccagtgcttcaacgggggccagcaacgacaaccactacttcggctacagcaccccctgggggtattttgatttcaacagattccactgccacttttcaccacgtgactggcagcgactcatcaacaacaattggggattccggcccaagagactcaacttcaaactcttcaacatccaagtcaaggaggtcacgacgaatgatggcgtcacaaccatcgctaataaccttaccagcacggttcaagtcttctcggactcggagtaccagcttccgtacgtcctcggctctgcgcaccagggctgcctccctccgttcccggcggacgtgttcatgattccgcaatacggctacctgacgctcaacaatggcagccaagccgtgggacgttcatccttttactgcctggaatatttcccttctcagatgctgagaacgggcaacaactttaccttcagctacacctttgaggaagtgcctttccacagcagctacgcgcacagccagagcctggaccggctgatgaatcctctcatcgaccaatacctgtattacccgaacagaactcaaaatcagtccggaagtgcccaaaacaaggacttgctgtttagccgtgggtctccagctggcatgtctgttcagcccaaaaactggctacctggaccctgttatcggcagcagcgcgtttctaaaacaaaaacagacaacaacaacagcaattttacctggactggtgcttcaaaatataacctcaatgggcgtgaatccatcatcaaccctggcactgctatggcctcacacaaagacgacgaagacaagttctttcccatgagcggtgtcatgatttttggaaaagagagcgccggagcttcaaacactgcattggacaatgtcatgattacagacgaagaggaaattaaagccactaaccctgtggccaccgaaagatttgggaccgtggcagtcaatttccagagcagcagcacagaccctgcgaccggagatgtgcatgctatgggagcattacctggcatggtgtggcaaggtagagacgtgtacctgcagggtcccatttgggccaaaattcctcacacagatggacactttcacccgtctcctcttatgggcggctttggactcaagaacccgcctcctcagatcctcatcaaaaacacgcctgttcctgcgaatcctccggcggagttttcagctacaaagtttgcttcattcatcacccaatactccacaggacaagtgagtgtggaaattgaatgggagctgcagaaagaaaacagcaagcgctggaatcccgaagtgcagtacacatccaattatgcaaaatctgccaacgttgattttactgtggacaacaatggactttatactgagcctcgccccattggcacccgttaccttacccgtcccctgtaa

SEQ ID NO: 4886 - protein, 736 aa, Adeno-associated virus
MAADGYLPDWLEDTLSEGIRQWWKLRPGPPPPKPAERHKDDSRGLVLPGYKYLGPFNGLDKGEPVNEADAAALEHDKAYDRQLDSGDNPYLKYNHADAEFQERLKEDTSFGGNLGRAVFQAKKRVLEPLGLVEEGAKTAPGKKRPVEQSPQGPDSSSGIGKTGQQPAKKRLNFGQTGDSESVPDPQPLGEPPATPAAVGPTTMASGGGAPMADNNEGADGVGNASGNWHCDSTWLGDRVITTSTRTWALPTYNNHLYKQISSASTGASNDNHYFGYSTPWGYFDFNRFHCHFSPRDWQRLINNNWGFRPKRLNFKLFNIQVKEVTTNDGVTTIANNLTSTVQVFSDSEYQLPYVLGSAHQGCLPPFPADVFMIPQYGYLTLNNGSQAVGRSSFYCLEYFPSQMLRTGNNFTFSYTFEEVPFHSSYAHSQSLDRLMNPLIDQYLYYPNRTQNQSGSAQNKDLLFSRGSPAGMSVQPKNWLPGPCYRQQRVSKTKTDNNNSNFTWTGASKYNLNGRESIINPGTAMASHKDDEDKFFPMSGVMIFGKESAGASNTALDNVMITDEEEIKATNPVATERFGTVAVNFQSSSTDPATGDVHAMGALPGMVWQGRDVYLQGPIWAKIPHTDGHFHPSPLMGGFGLKNPPPQILIKNTPVPANPPAEFSATKFASFITQYSTGQVSVEIEWELQKENSKRWNPEVQYTSNYAKSANVDFTVDNNGLYTEPRPIGTRYLTRPL

SEQ ID NO: 4887 - protein, 736 aa, Adeno-associated virus
MAADGYLPDWLEDTLSEGIRQWWKLRPGPPPPKPAERHKDDSRGLVLPGYKYLGPFNGLDKGEPVNEADAAALEHDKAYDRQLDSGDNPYLKYNHADAEFQERLKEDTSFGGNLGRAVFQAKKRVLEPLGLVEEGAKTAPGKKRPVEQSPQGPDSSSGIGKTGQQPAKKRLNFGQTGDSESVPDPQPLGEPPATPAAVGPTTMASGGGAPMADNNEGADGVGNASGNWHCDSTWLGDRVITTSTRTWALPTYNNHLYKQISSASTGASNDNHYFGYSTPWGYFDFNRFHCHFSPRDWQRLINNNWGFRPKRLNFKLFNIQVKEVTTNDGVTTIANNLTSTVQVFSDSEYQLPYVLGSAHQGCLPPFPADVFMIPQYGYLTLNNGSQAVGRSSFYCLEYFPSQMLRTGNNFTFSYTFEEVPFHSSYAHSQSLDRLMNPLIDQYLYYLNRTQNQSGSAQNKDLLFSRGSPAGMSVQPKNWLPGPCYRQQRVSKTKTDNNNSNFTWTGASKYNLNGRESIINPGTAMASHKDDEDKFFPMSGVMIFGKESAGASNTALDNVMITDEEEIKATNPVATERFGTVAVNFQSSSTDPATGDVHAMGALPGMVWQGRDVYLQGPIWAKIPHTDGHFHPSPLMGGFGLKNPPPQILIKNTPVPANPPAEFSATKFASFITQYSTGQVSVEIEWELQKENSKRWNPEVQYTSNYAKSANVDFTVDNNGLYTEPRPIGTRYLTRPL

SEQ ID NO: 4888 - protein, 736 aa, Adeno-associated virus
MAADGYLPDWLEDTLSEGIRQWWKLRPGPPPPKPAERHKDDSRGLVLPGYKYLGPFNGLDKGEPVNEADAAALEHDKAYDRQLDSGDNPYLKYNHADAEFQERLKEDTSFGGNLGRAVFQAKKRVLEPLGLVEEGAKTAPGKKRPVEQSPQGPDSSSGIGKTGQQPAKKRLNFGQTGDSESVPDPQPLGEPPATPAAVGPTTMASGGGAPMADNNEGADGVGNASGNWHCDSTWLGDRVITTSTRTWALPTYNNHLYKQISSASTGASNDNHYFGYSTPWGYFDFNRFHCHFSPRDWQRLINNNWGFRPKRLNFKLFNIQVKEVTTNDGVTTIANNLTSTVQVFSDSEYQLPYVLGSAHQGCLPPFPADVFMIPQYGYLTLNNGSQAVGRSSFYCLEYFPSQMLRTGNNFTFSYTFEEVPFHSSYAHSQSLDRLMNPLIDQYLYYLNRTQNQSGSAQNKDLLFSRGSPAGMSVQPKNWLPGPCYRQQRVSKTKTDNNNSNFTWTGASKYNLNGRESIINPGTAMASHKDDEDKFFPMSGVMIFGKESAGASNTALDNVMITDEEEIKATNPVATERFGTVAVNFQSSSTDPATGDVHAMGALPGMVWQDRDVYLQGPIWAKIPHTDGHFHPSPLMGGFGLKNPPPQILIKNTPVPANPPAEFSATKFASFITQYSTGQVSVEIEWELQKENSKRWNPEVQYTSNYAKSANVDFTVDNNGLYTEPRPIGTRYLTRPL

SEQ ID NO: 4889 - DNA, 2208 bp, Adeno-associated virus
  source 1..2208: mol_type = genomic DNA
atggctgccgatggctatcttccagattggctcgaggacactctctctgaaggaataagacagtggtggaagctcaaacctggcccaccaccaccaaagcccgcagagcggcatagggacgacagcaggggtcttgtgcttcctgggtacaagtacctcggacccttcaacggactcgacaagggagagccggtcaacgaggcagacgccgcggccctcgagcacgacaaagcctacgaccggcagctcgacagcggagacaacccgtacctcaagtacaaccacgccgacgcggagtttcaggagcgccttaaagaagatacgtcttttgggggcaacctcggacgagcagtcttccaggcgaaaaagagggttcttgaacctctgggcctggttgaggaacctgttaagacggctccgggaaaaaagaggccggtagagcactctcctgtggagccagactcctcctcgggaaccggaaaggcgggccagcagcctgcaagaaaaagattgaattttggtcagactggagacgcagactcagtacctgacccccagcctctcggacagccaccagcagccccctctggtctgggaactaatacgatggctacaggcagtggcgcaccaatggcagacaataacgagggcgccgacggagtgggtaattcctcgggaaattggcattgcgattccacatggatgggcgacagagtcatcaccaccagcacccgaacctgggccctgcccacctacaacaaccacctctacaaacaaatttccagccaatcaggagcctcgaacgacaatcactactttggctacagcaccccttgggggtattttgacttcaacagattccactgccacttttcaccacgtgactggcaaagactcatcaacaacaactggggattccgacccaagagactcaacttcaagctctttaacattcaagtcaaagaggtcacgcagaatgacggtacgacgacgattgccaataaccttaccagcacggttcaggtgtttactgactcggggtaccagctcccgtacgtcctcggctcggcgcatcaaggatgcctcccgccgttcccagcagacgtcttcatggtgccacagtatggataccccaccctgaacaacgggagtcaggcagtaggacgctcttcattttactgcctggagtactttccttctcagatgctgcgtaccggaaacaactttaccttcagctacacttttgaggacgttcctttccacagcagctacgctcacagccagagtctggaccgtctcatgaatcctctcatcgaccagtacctgtattacttgagcacaacaaacactccaagtggaaccaccacgcagtcaaggcttcagttttctcaggccggagcgagtgacattcgggaccagtctaggaactggcttcctggaccctgttaccgccagcagcgagtatcaaagacatctgcggataacaacaacagtgaatactcgtggactggagctaccaagtaccacctcaatggcagagactctctggtgaatccgggcccggccgtggcaagccacaaggacgatgaagaaaagttttttcctcagagcggggttctcatctttgggaagcaaggctcagagaaaacaaatgtggacattgaaaaggtcatgattacagacgaagaggaaatcaggacaaccaatcccgtggctacggagcagtatggttctgtatctaccaacctccagagaggcaacagacaagcagctaccgcagatgtcaacacacaaggcgttcttccaggcatggtctggcaggacagagatgtgtaccttcaggggcccatctgggcaaagattccacacacggacggacattttcacccctctcccctcatgggtggattcggacttaaacaccctcctccacagattctcatcaagaacaccccggtacctgcgaatccttcgaccaccttcagtgcggcaaagtttgcttccttcatcacacagtactccacgggacaggtcagcgtggagatcgagtgggagctgcagaaggaaaacagcaaacgctggaatcccgaaattcagtacacttccaactacaacaagtctgttaatgtggactttactgtggacactaatggcgtgtattcagagcctcgccccattggcaccagatacctgactcgtaatctgtaa

SEQ ID NO: 4890 - protein, 735 aa, Adeno-associated virus
MAADGYLPDWLEDTLSEGIRQWWKLKPGPPPPKPAERHRDDSRGLVLPGYKYLGPFNGLDKGEPVNEADAAALEHDKAYDRQLDSGDNPYLKYNHADAEFQERLKEDTSFGGNLGRAVFQAKKRVLEPLGLVEEPVKTAPGKKRPVEHSPVEPDSSSGTGKAGQQPARKRLNFGQTGDADSVPDPQPLGQPPAAPSGLGTNTMATGSGAPMADNNEGADGVGNSSGNWHCDSTWMGDRVITTSTRTWALPTYNNHLYKQISSQSGASNDNHYFGYSTPWGYFDFNRFHCHFSPRDWQRLINNNWGFRPKRLNFKLFNIQVKEVTQNDGTTTIANNLTSTVQVFTDSGYQLPYVLGSAHQGCLPPFPADVFMVPQYGYPTLNNGSQAVGRSSFYCLEYFPSQMLRTGNNFTFSYTFEDVPFHSSYAHSQSLDRLMNPLIDQYLYYLSTTNTPSGTTTQSRLQFSQAGASDIRDQSRNWLPGPCYRQQRVSKTSADNNNSEYSWTGATKYHLNGRDSLVNPGPAVASHKDDEEKFFPQSGVLIFGKQGSEKTNVDIEKVMITDEEEIRTTNPVATEQYGSVSTNLQRGNRQAATADVNTQGVLPGMVWQDRDVYLQGPIWAKIPHTDGHFHPSPLMGGFGLKHPPPQILIKNTPVPANPSTTFSAAKFASFITQYSTGQVSVEIEWELQKENSKRWNPEIQYTSNYNKSVNVDFTVDTNGVYSEPRPIGTRYLTRNL

SEQ ID NO: 4891 - DNA, 2211 bp, Adeno-associated virus
  source 1..2211: mol_type = genomic DNA
atggctgccgacggttatcttccagattggctcgaggacactctctctgaaggaataagacagtggtggaagctcaaacctggcccaccaccaccaaagcccgcagagcggcataaggacgacagcaggggtcttgtgcttcctgggtacaagtacctcggacccttcaacggactcgacaagggagagccggtcaacgaggcagacgccgcggccctcgagcacgacaaagcctacgaccggcagctcgacagcggagacaacccgtacctcaagtacaaccacgccgacgcggagtttcaggagcgccttaaagaagatacgtcttttgggggcaacctcgggcgggcagtcttccaggccaagaagcgggttctcgaacctctcggtctggttgaggaaggcgctaagacggctcctggaaagaaacgtccggtagagcagtcgccacaagagccagactccccctcgggcatcggcaagacaggccagcagcccgctaaaaagagactcaattttggtcagactggcgactcagagtcagtccccgatccacaacctctcggagaacctccagcaacccccgctgctgtgggacctactacaatggcttcaggcggtggcgcaccaatggcagacaataacgaaggcgccgacggagtgggtaatgcctcaggaaattggcactgcgattccacatggctgggcgacagagtcatcaccaccagcacccgcacctgggccttgcccacctacaataaccacctctacaagcaaatctccagtgcttcaacgggggccagcaacgacaaccactacttcggctacagcaccccctgggggtattttgatttcaacagattccactgccacttttcaccacgtgactggcagcgactcatcaacaacaattggggattccggcccaagagactcaacttcaaactcttcaacatccaagtcaaggaggtcacgacgaatgatggcgtcacaaccatcgctaataaccttaccagcacggttcaagtcttctcggactcggagtaccagcttccgtacgtcctcggctctgcgcaccagggccgcctccctccgttcccggcggacgtgttcatgattccgcaatacggctacctgacgctcaacaatggcagccaagccgtgggacgttcatcctcttactgcctggaatatttcccttctcagatgctgagaacgggcaacaactttaccttcagctacacctttgaggaagtgcctctccacagcagctgcgcgcacagccagagcctggaccggctgatgaatcctctcatcgaccaatacctgtattacctgaacagaactcaaaatcagtccggaagtgcccaaaacagggacttgctgttcagccgtgggtctccagctggcatgtctgttcagcccaaaaactggctacctggaccctgttatcggcagcagcgcgtttctaaaacaaaaacagacaacaacaacagcaattttacctggactggtgcttcaaaatataacctcaatgggcgtgaatccatcatcaaccctggcactgctatggcctcacacaaagacgacgaagacaagttctttcccatgagcggtgtcatgatttttggaaaagagagcgccggagcttcaaacactgcattggacaatgtcatgattacagacgaagaggaaattaaagccactaaccctgtggccaccgaaagatttgggaccgtggcagtcaatttccagagcagcagcacagaccctgcgaccggagatgtgcatgctatgggagcattacctggcatggtgtggcaagatagagacgtgtacctgcagggtcccatttgggccaaaattcctcacacagatggacactttcacccgtctcctcttatgggcggctttggactcaagaacccgcctcctcagatcctcatcaaaaacacgcctgttcctgcgaatcctccggcggagttttcagctacaaagtttgcttcattcatcacccaatactccgcaggacaagtgagtgtggaaattgaatgggagctgcagaaagaaaacagcaagcgctggaatcccgaagtgcagtacacatccaattatgcaaaatctgccaacgttgattttactgtggacaacaatggactttatactgagcctcgccccattggcacccgttaccttacccgtcccctgtaa

SEQ ID NO: 4892 - protein, 736 aa, Adeno-associated virus
MAADGYLPDWLEDTLSEGIRQWWKLKPGPPPPKPAERHKDDSRGLVLPGYKYLGPFNGLDKGEPVNEADAAALEHDKAYDRQLDSGDNPYLKYNHADAEFQERLKEDTSFGGNLGRAVFQAKKRVLEPLGLVEEGAKTAPGKKRPVEQSPQEPDSPSGIGKTGQQPAKKRLNFGQTGDSESVPDPQPLGEPPATPAAVGPTTMASGGGAPMADNNEGADGVGNASGNWHCDSTWLGDRVITTSTRTWALPTYNNHLYKQISSASTGASNDNHYFGYSTPWGYFDFNRFHCHFSPRDWQRLINNNWGFRPKRLNFKLFNIQVKEVTTNDGVTTIANNLTSTVQVFSDSEYQLPYVLGSAHQGRLPPFPADVFMIPQYGYLTLNNGSQAVGRSSSYCLEYFPSQMLRTGNNFTFSYTFEEVPLHSSCAHSQSLDRLMNPLIDQYLYYLNRTQNQSGSAQNRDLLFSRGSPAGMSVQPKNWLPGPCYRQQRVSKTKTDNNNSNFTWTGASKYNLNGRESIINPGTAMASHKDDEDKFFPMSGVMIFGKESAGASNTALDNVMITDEEEIKATNPVATERFGTVAVNFQSSSTDPATGDVHAMGALPGMVWQDRDVYLQGPIWAKIPHTDGHFHPSPLMGGFGLKNPPPQILIKNTPVPANPPAEFSATKFASFITQYSAGQVSVEIEWELQKENSKRWNPEVQYTSNYAKSANVDFTVDNNGLYTEPRPIGTRYLTRPL

SEQ ID NO: 4893 - protein, 736 aa, Adeno-associated virus
MAADGYLPDWLEDTLSEGIRQWWKLKPGPPPPKPAERHKDDSRGLVLPGYKYLGPFNGLDKGEPVNEADAAALEHDKAYDRQLDSGDNPYLKYNHADAEFQERLKEDTSFGGNLGRAVFQAKKRVLEPLGLVEEGAKTAPGKKRPVEQSPQEPDSSSGIGKTGQQPAKKRLNFGQTGDSESVPDPQPLGEPPATPAAVGPTTMASGGGAPMADNNEGADGVGNASGNWHCDSTWLGDRVITTSTRTWALPTYNNHLYKQISSASTGASNDNHYFGYSTPWGYFDFNRFHCHFSPRDWQRLINNNWGFRPKRLNFKLFNIQVKEVTTNDGVTTIANNLTSTVQVFSDSEYQLPYVLGSAHQGCLPPFPADVFMIPQYGYLTLNNGSQAVGRSSFYCLEYFPSQMLRTGNNFTFSYTFEEVPLHSSCAHSQSLDRLMNPLIDQYLYYLNRTQNQSGSAQNRDLLFSRGSPAGMSVQPKNWLPGPCYRQQRVSKTKTDNNNSNFTWTGASKYNLNGRESIINPGTAMASHKDDEDKFFPMSGVMIFGKESAGASNTALDNVMITDEEEIKATNPVATERFGTVAVNFQSSSTDPATGDVHAMGALPGMVWQDRDVYLQGPIWAKIPHTDGHFHPSPLMGGFGLKNPPPQILIKNTPVPANPPAEFSATKFASFITQYSTGQVSVEIEWELQKENSKRWNPEVQYTSNYAKSANVDFTVDNNGLYTEPRPIGTRYLTRPL

SEQ ID NO: 4894 - DNA, 2208 bp, Adeno-associated virus
  source 1..2208: mol_type = genomic DNA
atggctgccgatggctatcttccagattggctcgaggacactctctctgaaggaataagacagtggtggaagctcaaacctggcccaccaccaccaaagcccgcagagcggcatagggacgacagcaggggtcttgtgcttcctgggtacaagtacctcggacccttcaacggactcgacaagggagagccggtcaacgaggcagacgccgcggccctcgagcacgacaaagcctacgaccggcagctcgacagcggagacaacccgtacctcaagtacaaccacgccgacgcggagtttcaggagcgccttaaagaagatacgtcttttgggggcaacctcggacgagcagtcttccaggcgaaaaagagggttcttgaacctctgggcctggttggggaacctgttaagacggctccgggaaaaaagaggccggtagagcactctcctgtggagccagactcctcctcgggaaccggaaaggcgggccagcagcctgcaagaaaaagattgaattttggtcagactggagacgcagactcagtacctgacccccagcctctcggacagccaccagcagccccctctggtctgggaactaatacgatggctacaggcagtggcgcaccaatggcagacaataacgagggcgccgacggagtgggtaattcctcgggaaattggcattgcgattccacatggatgggcgacagagtcatcaccaccagcacccgaacctgggccctgcccacctacaacaaccacctctacaaacaaatttccagccaatcaggagcctcgaacgacagtcactactttggctacagcaccccttgggggtattttgacttcaacagattccactgccacttttcaccacgtgactggcaaagactcatcaacaacaactggggattccgacccaagagactcaacttcaagctctttaacattcaagtcaaagaggtcacgcagaatgacggtacgacgacgattgccaataaccttaccagcacggttcaggtgtttactgactcggagtaccagctcccgtacgtcctcggctcggcgcatcaaggatgcctcccgccgttcccagcagacgtcttcatggtgccacagtatggatacctcaccctgaacaacgggagtcaggcagtaggacgctcttcattttactgcctggagtactttccttctcagatgctgcgtaccggaaacaactttaccttcagctacacttttgaggacgttcctttccacagcagctacgctcacagccagagtctggaccgtctcatgaatcctctcatcgaccagtacctgtattacttgagcacaacaaacactccaagtggaaccaccacgcagtcaaggctccagttttctcaggccggagcgagtgacattcgggaccagtctaggaactggcttcctggaccctgttaccgccagcagcgagtatcaaagacatctgcggataacaacaacagtgaatactcgtggactggagctaccaagtaccacctcaatggcagagactctctggtgaatccgggcccggccatggcaagccacaaggacaatgaagaaaagttttttcctcagagcggggttctcatctttgggaagcaaggctcagagaaaacaaatgtggacattgaaaaggtcatgattacagacgaagaggaaatcaggacaaccaatcccgtggctacggagcagtatggttctgtatctaccaacctccagagaggcaacagacaagcagctaccgcagatgtcaacacacaaggcgttcttccaggcatggtctggcaggacagagatgtgtaccttcaggggcccatctgggcaaagattccacacacggacggacattttcacccctctcccctcatgggtggattcggacttaaacaccctcctccacagattctcatcaagaacaccccggtacctgcgaatccttcgaccaccttcagtgcggcaaagtttgcttccttcatcacacagtactccacgggacaggtcagcgtggagatcgagtgggagctgcagaaggaaaacagcaaacgctggaatcccgaaattcagtacacttccaactacaacaagtctgttaatgtggactttactgtggacactaatggcgtgtattcagagcctcgccccattggcaccagatacctgactcgtaatctgtaa

SEQ ID NO: 4895 - protein, 735 aa, Adeno-associated virus
MAADGYLPDWLEDTLSEGIRQWWKLKPGPPPPKPAERHRDDSRGLVLPGYKYLGPFNGLDKGEPVNEADAAALEHDKAYDRQLDSGDNPYLKYNHADAEFQERLKEDTSFGGNLGRAVFQAKKRVLEPLGLVGEPVKTAPGKKRPVEHSPVEPDSSSGTGKAGQQPARKRLNFGQTGDADSVPDPQPLGQPPAAPSGLGTNTMATGSGAPMADNNEGADGVGNSSGNWHCDSTWMGDRVITTSTRTWALPTYNNHLYKQISSQSGASNDSHYFGYSTPWGYFDFNRFHCHFSPRDWQRLINNNWGFRPKRLNFKLFNIQVKEVTQNDGTTTIANNLTSTVQVFTDSEYQLPYVLGSAHQGCLPPFPADVFMVPQYGYLTLNNGSQAVGRSSFYCLEYFPSQMLRTGNNFTFSYTFEDVPFHSSYAHSQSLDRLMNPLIDQYLYYLSTTNTPSGTTTQSRLQFSQAGASDIRDQSRNWLPGPCYRQQRVSKTSADNNNSEYSWTGATKYHLNGRDSLVNPGPAMASHKDNEEKFFPQSGVLIFGKQGSEKTNVDIEKVMITDEEEIRTTNPVATEQYGSVSTNLQRGNRQAATADVNTQGVLPGMVWQDRDVYLQGPIWAKIPHTDGHFHPSPLMGGFGLKHPPPQILIKNTPVPANPSTTFSAAKFASFITQYSTGQVSVEIEWELQKENSKRWNPEIQYTSNYNKSVNVDFTVDTNGVYSEPRPIGTRYLTRNL

SEQ ID NO: 4896 - protein, 737 aa, Adeno-associated virus
RMAADGYLPDWLEDNLSEGIREWWDLKPGAPKPKANQQKQDDGRGLVLPGYKYLGPFNGLDKGEPVNAADAAALEHDKAYDQQLKAGDNPYLRYNHADAEFQERLQEDTSFGGNLGRAVFQAKKRVLEPLGLVEEGAKTAPGKKRPVEQSPQEPDSSSGIGKTGQQPAKKRLNFGQTGDSESVPDPQPLGEPPATPAAVGPTTMASGGGAPMADNNEGADGVGNASGNWHCDSTWLGDRVITTSTRTWALPTYNNHLYKQISSTSTGASNDNHYFGYGTPWGYFDFNRFHCHFSPRDWQRLINNNWGFRPKRLNFKLFNIQVEEVTTNDGVTTIANNLTSTVQVFSDSEYQLPYVLGSAHQGCLPPFPADVFMIPQYGYLTLNNGSQAVGRSSFYCLEYFPSQMLRTGNNFTFSYTFEEVPFHSSYAHSQSLDRLMNPLIDQYLYYLNRTQNQSGSAQNKDLLFSRGSPAGMSVQPKNWLPGPCYRQQRVSKTKTDNNNSNFTWTGASKYNLNGRESIINPGTAVASHKDDEDKFFPMSGVMIFGKESAGASSTALDNVMITDEEEIKATNPVATERFGTVAVNFQSSSTDPATGDVHAMGALPGMVWQDRDVYLQGPIWAKIPHTDGHFHPSPLMGGFGLKNPPPQILIKNTPVPANPPAEFSATKFASFITQYSTGQVSVEIEWELQKENSKRWNPEVQYTSNYAKSANVDFTVDNNGLYTEPRPIGTRYLTRPL

SEQ ID NO: 4897 - protein, 736 aa, Adeno-associated virus
MAADGYLPDWLEDNLSEGIREWWDLKPGAPKPKANQQKQDDGRGLVLPGYKYLGPFNGLDKGEPVNAADAAALEHDKAYDQQLKAGDNPYLRYNHADAEFQERLQEDTSFGGNLGRAVFQAKKRVLEPLGLVEEGAKTAPGKKRPVEQSPQEPDSSSGIGKTGQQPAKKRLNFGQTGDSESVPDPQPLGEPPATPAAVGPTTMASGGGAPMADNNEGADGVGNASGNWHCDSTWLGDRVITTSTRTWALPTYNNHLYKQISSTSTGASNDNHYFGYGTPWGYFDFNRFHCHFSPRDWQRLINNNWGFRPKRLNFKLFNIQVEEVTTNDGVTTIANNLTSTVQVFSDSEYQLPYVLGSAHQGCLPPFPADVFMIPQYGYLTLNNGSQAVGRSSFYCLEYFPSQMLRTGNNFTFSYTFEEVPFHSSYAHSQSLDRLMNPLIDQYLYYLNRTQNQSGSAQNKDLLFSRGSPAGMSVQPKNWLPGPCYRQQRVSKTKTDNNNSNFTWTGASKYNLNGRESIINPGTAVASHKDDEDKFFPMSGVMIFGKESAGASSTALDNVMITDEEEIKATNPVATERFGTVAVNFQSSSTDPATGDVHAMGALPGMVWQDRDVYLQGPIWAKIPHTDGHFHPSPLMGGFGLKNPPPQILIKNTPVPANPPAEFSATKFASFITQYSTGQVSVEIEWELQKENSKRWNPEVQYTSNYAKSANVDFTVDNNGLYTEPRPIGTRYLTRPL

SEQ ID NO: 4898 - DNA, 2211 bp, Adeno-associated virus
  source 1..2211: mol_type = genomic DNA
atggctgccgatggttatcttccagattggctcgaggacaacctctctgagggcattcgcgagtggtgggacttgaaacctggagccccgaagcccaaagccaaccagcaaaagcaggacgacggccggggtctggtgcttcctggctacaagtacctcggacccttcaacggactcgacaagggggagcccgtcaacgcggcggacgcagcggccctcgagcacgacaaggcctacgaccagcagctcaaagcgggtgacaatccgtacctgcggtataaccacgccgacgccgagtttcaggagcgtctgcaagaagatacgtcttttgggggcaacctcgggcgagcagtcttccaggccaagaagcgggttctcgaacctctcggtctggttgaggaaggcgctaagacggctcctggaaagaaacgtccggtagagcagtcgccacaagagccagactcctcctcgggcatcggcaagacaggccagcagcccgctaaaaagagactcaattttggccagactggcgactcagagtcagtccccgatccacaacctctcggagaacctccagcaacccccgctgctgtgggacctactacaatggcttcaggcggtggcgcaccaatggcagacaataacgaaggcgccgacggagtgggtaatgcctcaggaaattggcattgcgattccacatggctgggcgacagagtcatcaccaccagcacccgcacctgggccttgcccacctacaataaccacctctacaagcaaatctccagtacttcaacgggggccagcaacgacaaccactacttcggctacggcaccccctgggggtattttgatttcaacagattccactgccacttttcaccacgtgactggcagcgactcatcaacaacaattggggattccggcccaagagactcaacttcaaactcttcaacatccaagtcgaggaggtcacgacgaatgatggcgtcacaaccatcgctaataaccttaccagcacggttcaagtcttctcggactcggagtaccagcttccgtacgtcctcggctctgcgcaccagggctgcctccctccgttcccggcggacgtgttcatgattccgcaatacggctacctgacgctcaacaatggcagccaagccgtgggacgttcatccttttactgcctggaatatttcccttctcagatgctgagaacgggcaacaactttaccttcagctacacctttgaggaagtgcctttccacagcagctacgcgcacagccagagcctggaccggctgatgaatcctctcatcgaccaatacctgtattacctgaacagaacacaaaatcagtccggaagtgcccaaaacaaggacttgctgtttagccgtgggtctccagctggcatgtctgttcagcccaaaaactggctacctggaccctgttatcggcagcagcgcgtttctaaaacaaaaacagacaacaacaacagcaattttacctggactggtgcttcaaaatataacctcaatgggcgtgaatccatcatcaaccctggcaccgctgtggcctcacacaaagacgacgaagacaagttctttcccatgagcggtgtcatgatttttggaaaagagagcgccggagcttcaagcactgcattggacaatgtcatgattacagacgaagaggaaattaaagccactaaccctgtggccaccgaaagatttgggaccgtggcagtcaatttccagagcagcagcacagaccctgcgaccggagatgtgcatgctatgggagcattacctggcatggtgtggcaagatagagacgtgtacctgcagggtcccatttgggccaaaattcctcacacagatggacactttcacccgtctcctcttatgggcggctttggactcaagaacccgcctcctcagatcctcatcaaaaacacgcctgttcctgcgaatcctccggcggagttttcagctacaaagtttgcttcattcatcacccaatactccacaggacaagtgagtgtggaaattgaatgggagctgcagaaagaaaacagcaagcgctggaatcccgaagtgcagtacacatccaattatgcaaaatctgccaacgttgattttactgtggacaacaatggactttatactgagcctcgccccattggcacccgttaccttacccgtcccctgtaa

SEQ ID NO: 4899 - protein, 737 aa, Adeno-associated virus
RMAADGYLPDWLEDNLSEGIREWWDLKPGAPKPKANQQKQDDGRGLVLPGYKYLGPFNGLDKGEPVNAADAAALEHDKAYDQQLKAGDNPYLRYNHADAEFQERLQEDTSFGGNLGRAVFQAKKRVLEPLGLVEEGAKTAPGKKRPVEQSPQEPDSSSGIGKTGQQPAKKRLNFGQTGDSESVPDPQPLGEPPATPAAVGPTTMASGGGAPMADNNEGADGVGNASGNWHCDSTWLGDRVITTSTRTWALPTYNNHLYKQISSTSTGASNDNHYFGYSTPWGYFDFNRFHCHFSPRDWQRLINNNWGFRPKRLNFKLFNIQVEEVTTNDGVTTIANNLTSTVQVFSDSEYQLPYVLGSAHQGCLPPFPADVFMIPQYGYLTLNNGSQAVGRSSFYCLEYFPSQMLRTGNNFTFSYTFEEVPFHSSYAHSQSLDRLMNPLIDQYLYYLNRTQNQSGSAQNKDLLFSRGSPAGMSVQPKNWLPGPCYRQQRVSKTKTDNNNSNFTWTGASKYNLNGRESIINPGTAVASHKDDEDKFFPMSGVMIFGKESAGASSTALDNVMITDEEEIKATNPVATERFGTVAVNFQSSSTDPATGDVHAMGALPGMVWQDRDVYLQGPIWAKIPHTDGHFHPSPLMGGFGLKNPPPQILIKNTPVPANPPAEFSATKFASFITQYSTGQVSVEIEWELQKENSKRWNPEVQYTSNYAKSANVDFTVDNNGLYTEPRPIGTRYLTRPL

SEQ ID NO: 4900 - protein, 737 aa, Adeno-associated virus
RMAADGYLPDWLEDNLSEGIREWWDLKPGAPKPKANQQKQDDGRGLVLPGYKYLGPFNGLDKGEPVNAADAAALEHDKAYDQQLKAGDNPYLRYNHADAEFQERLQEDTSFGGNLGRAVFQAKKRVLEPLGLVEEGAKTAPGKKRPVEQSPQEPDSSSGIGKTGQQPAKKRLNFGQTGDSESVPDPQPLGEPPATPAAVGPTTMASGGGAPMADNNEGADGVGNASGNWHCDSTWLGDRVITTSTRTWALPTYNNHLYKQISSTSTGASNDNHYFGYSTPWGYFDFNRFHCHFSPRDWQRLINNNWGFRPKRLNFKLFNIQVKEVTTNDGVTTIANNLTSTVQVFSDSEYQLPYVLGSAHQGCLPPFPADVFMIPQYGYLTLNNGSQAVGRSSFYCLEYFPSQMLRTGNNFTFSYTFEEVPFHSSYAHSQSLDRLMNPLIDQYLYYLNRTQNQSGSAQNKDLLFSRGSPAGMSVQPKNWLPGPCYRQQRVSKTKTDNNNSNFTWTGASKYNLNGRESIINPGTAVASHKDDEDKFFPMSGVMIFGKESAGASSTALDNVMITDEEEIKATNPVATERFGTVAVNFQSSSTDPATGDVHAMGALPGMVWQDRDVYLQGPIWAKIPHTDGHFHPSPLMGGFGLKNPPPQILIKNTPVPANPPAEFSATKFASFITQYSTGQVSVEIEWELQKENSKRWNPEVQYTSNYAKSANVDFTVDNNGLYTEPRPIGTRYLTRPL

SEQ ID NO: 4901 - protein, 737 aa, Adeno-associated virus
RMAADGYLPDWLEDNLSEGIREWWDLKPGAPKPKANQQKQDDGRGLVLPGYKYLGPFNGLDKGEPVNAADAAALEHDKAYDQQLKAGDNPYLRYNHADAEFQERLQEDTSFGGNLGRAVFQAKKRVLEPLGLVEEGAKTAPGKKRPVEQSPQEPDSSSGIGKTGQQPAKKRLNFGQTGDSESVPDPQPLGEPPATPAAVGPTTMASGGGAPMADNNEGADGVGNASGNWHCDSTWLGDRVITTSTRTWALPTYNNHLYKQISSTSTGASNDNHYFGYSTPWGYFDFNRFHCHFSPRDWQRLINNNWGFRPKRLNFKLFNIQVKEVTTNDGVTTIANNLTSTVQVFSDSEYQLPYVLGSAHQGCLPPFPADVFMIPQYGYLTLNNGSQAVGRSSFYCLEYFPSQMLRTGNNFTFSYTFEEVPFHSSYAHSQSLDRLMNPLIDQYLYYLNRTQNQSGSAQNKDLLFSRGSPAGMSVQPKNWLPGPCYRQQRVSKTKTDNNNSNFTWTGASKYNLNGRESIINPGTAVASHKDDEDKFFPMSGVMIFGKESAGANSTALDNVMITDEEEIKATNPVATERFGTVAVNFQSSSTDPATGDVHAMGALPGMVWQDRDVYLQGPIWAKIPHTDGHFHPSPLMGGFGLKNPPPQILIKNTPVPANPPAEFSATKFASFITQYSTGQVSVEIEWELQKENSKRWNPEVQYTSNYAKSANVDFTVDNNGLYTEPRPIGTRYLTRPL

SEQ ID NO: 4902 - DNA, 2208 bp, Adeno-associated virus
  source 1..2208: mol_type = genomic DNA
atggctgccgatggttatcttccagattggctcaaggacactctctctgaaggaataagacagtggtggaagctcaaacctggcccaccaccaccaaagcccgcagagcggcataaggacgacagcgggggtcttgtgcttcctgggtacaagtacctcggacccttcaacggactcgacaagggagagccggtcaacgaggcagacgccgcggccctcgagtacgacaaggcctacgaccggcagctcgacagcggagacaacccgtacctcaagtacaaccacgccgacgcggagtttcaggagcgccttaaagaagatacgtcttttgggggcaacctcggacgagcagtcttccaggcgaaaaagagggttcttgaacctctgggcctggttgaggaacctgttaagacggctccgggaaaaaagaggccggtagagcactctcctgtggagccagactcctcctcgggaacaggaaaagcgggccagcagcctgcgagaaagagattgaattttggtcagactggagacgcagactccgtacctgacccccagcctctcggacagccaccagcagccccctctggtctgggaactaatacgatggctacaggcagtggcgcaccaatggcagacaataacgagggcgccgacggagtgggtaattcctcgggaagttggcattgcgattccacatggatgggcgacagagtcatcaccaccagcacccgaacctgggctctgcccacctacaacaaccatctgtacaagcagatctccagccaatcaggagccagcaacgacaaccactactttggctacagcaccccttgggggtattttgacttcaacagattccactgccacttttcaccacgtgactggcaaagactcatcaacaacaactggggattccggcccaagagactcaacttcaagctctttaacattcaagtcaaggaggtcacgcagaatgacggtacgacgacgattgccaataaccttaccagcacggttcaggtgtttactgactcggagtaccagctcccgtacgtccccggctcggcgcatcaaggatgcctcccgccgttcccagcagacgtcttcatggtgccacagtatggatacctcaccctgaacaacgggagtcaggcagtaggacgctcttcattttactgcctggagtactttccttctcagatgcttcgtaccggaaacaactttaccttcagctacacctttgaggatgttcctttccacagcagctacgctcacagccagagtttggaccgtctcatgaatcctctcatcgaccagtacctgtattacttgagcagaacaaacactccaagcggaaccaccacgcagtccaggcttcagttttctcaggccggagcaagtgacattcgggaccagtctaggaactggcttcctggaccctgttaccgccagcagcgagtatcaaagacagctgcggacaacaacaacagtgaatactcgtggactggagctaccaagtaccacctcaatggcagagactctctggtgaatccgggcccggccatggccagccacaaggacgatgaagaaaagttttttcctcaaagcggggttctcatctttgggaagcaaggctcagagaaaacaaatgtggacattgaaaaggtcatgattacagacgaagaggaaatcagaaccaccaatcccgtggccacggagcagtatggttctgtatctaccaacctccagagcggcaacacacaagcagctactgcagatgtcaacacacaaggcgttcttccaggcatggtctggcaggacagagacgtgcacctgcaggggcctatctgggcaaagattccacacacggacggacattttcacccctctcccctcatgggcggatttggacttaaacaccctcctccacagattctcatcaagaacaccccggtacctgcaaatccttcgaccaccttcagtgcggcaaagtttgcttccttcatcacacagtattccacagggcaggtcagcgtggagatcgagtgggagctgcagaaggagaacagcaaacgctggaaccccgagatccagtacacttccaactacaacaaatctgttaatgtggactttactgtggacactaatggtgtgtattcagagcctcgccccattggcaccagatacctgactcgtaatctgtaa

SEQ ID NO: 4903 - protein, 735 aa, Adeno-associated virus
MAADGYLPDWLKDTLSEGIRQWWKLKPGPPPPKPAERHKDDSGGLVLPGYKYLGPFNGLDKGEPVNEADAAALEYDKAYDRQLDSGDNPYLKYNHADAEFQERLKEDTSFGGNLGRAVFQAKKRVLEPLGLVEEPVKTAPGKKRPVEHSPVEPDSSSGTGKAGQQPARKRLNFGQTGDADSVPDPQPLGQPPAAPSGLGTNTMATGSGAPMADNNEGADGVGNSSGSWHCDSTWMGDRVITTSTRTWALPTYNNHLYKQISSQSGASNDNHYFGYSTPWGYFDFNRFHCHFSPRDWQRLINNNWGFRPKRLNFKLFNIQVKEVTQNDGTTTIANNLTSTVQVFTDSEYQLPYVPGSAHQGCLPPFPADVFMVPQYGYLTLNNGSQAVGRSSFYCLEYFPSQMLRTGNNFTFSYTFEDVPFHSSYAHSQSLDRLMNPLIDQYLYYLSRTNTPSGTTTQSRLQFSQAGASDIRDQSRNWLPGPCYRQQRVSKTAADNNNSEYSWTGATKYHLNGRDSLVNPGPAMASHKDDEEKFFPQSGVLIFGKQGSEKTNVDIEKVMITDEEEIRTTNPVATEQYGSVSTNLQSGNTQAATADVNTQGVLPGMVWQDRDVHLQGPIWAKIPHTDGHFHPSPLMGGFGLKHPPPQILIKNTPVPANPSTTFSAAKFASFITQYSTGQVSVEIEWELQKENSKRWNPEIQYTSNYNKSVNVDFTVDTNGVYSEPRPIGTRYLTRNL

SEQ ID NO: 4904 - DNA, 2208 bp, Adeno-associated virus
  source 1..2208: mol_type = genomic DNA
atggctgccgatggttatcttccagattggctcgaggacactctctctgaaggaataagacagtggtggaagctcaaacctggcccaccaccaccaaagcccgcagagcggcataaggacgacagcaggggtcttgtgcttcctgggtacaagtacctcggacccttcaacggactcgacaagggggagccggtcaacgaggcagacgccgcggccctcgagcacgacaaggcctacgaccggcagctcgacagcggagacaacccgtacctcaagtacaaccacgccgacgcagagtttcaggagcgccttaaagaagatacgtcttttgggggcaacctcggacgagcagtcttccaggcgaaaaagagggttcttgaacctctgggcctggttgaggaacctgttaagacggctccgggaaaaaagaggccggtagagcactctcctgtggagccagactcctcctcgggaaccggaaaagcgggccagcagcctgcaagaaaaagattaaattttggtcagactggagacgcagactccgtacctgacccccagcctctcggacagccaccagcagccccctctggtctgggatctactacaatggctacaggcagtggcgcaccaatggcagacaataacgagggtgccgatggagtgggtaattcctcaggaaattggcattgcgattcccaatggctgggcgacagagtcatcaccaccagcacccgaacctgggccctgcccacatacaacaaccacctctacaagcaaatctccagccaatcaggagccagcaacgacaaccactactttggctacagcaccccctgggggtattttgacttcaacagattccactgccacttttcaccacgtgactggcaaagactcatcaacaacaactggggattccggcccaaaagactcaacttcaagctctttaatattcaagtcaaagaggtcacgcagaatgacggtacgacgacgattgccaataaccttaccagcacggttcaggtgtttactgactcggagtaccagctcccgtacgtcctgggctcggcgcatcaaggatgcctcccgccgtttccagcggacgtcttcatggtcccacagtatggatacctcaccctgaacaacgggagtcaggcggtaggacgctcttccttttactgcctggagtactttccttctcagatgctgcgtactggaaacaactttcagttcagctacacttttgaagacgtgcctttccacagcagctacgctcacagccagagtctggatcggctgatgaatcctctgatcgaccagtacctgtattatctgaacaagacacaaacaaatagtggaactcttcagcagtctcggctactgtttagccaagctggaccaaccaacatgtctcttcaagctaaaaactggctgcctggaccttgctacagacagcagcgtctgtcaaaacaggcaaacgacaacaacaacagcaactttccctggactgcagctacaaagtatcatctaaatggccgggactcgttggttaatccaggaccagctatggccagtcgcaaggatgacgaagaaaagtttttccccatgcatggaaccctgatatttggtaaacaaggaacaaatgccaacgacgcggatttggaaaatgtcatgattacagatgaagaagaaatcagggccaccaatcccgtggctacggagcagtacgggactgtgtcaaataatttgcaaaactcaaacactggtccaactactggaactgtcaatcaccaaggagcgttacctggtatggtgtggcaggatcgagacgtgtacctgcagggacccatttgggccaagattcctcacaccgatggacactttcatccttctccactgatgggaggttttggactcaaacacccgcctcctcagatcatgatcaaaaacactcccgttccagccaatcctcccacaaacttcagttctgccaagtttgcttctttcatcacacagtattccacgggacaggtcagcgtggagatcgagtgggagctgcagaaggagaacagcaaacgctggaatcccgaaattcagtacacttccaactacaacaagtctgttaatgtggactttactgtggacactaatggtgtgtattcagagcctcgccccattggcaccagatacctgactcgtaatctgtaa

SEQ ID NO: 4905 - protein, 735 aa, Adeno-associated virus
MAADGYLPDWLEDTLSEGIRQWWKLKPGPPPPKPAERHKDDSRGLVLPGYKYLGPFNGLDKGEPVNEADAAALEHDKAYDRQLDSGDNPYLKYNHADAEFQERLKEDTSFGGNLGRAVFQAKKRVLEPLGLVEEPVKTAPGKKRPVEHSPVEPDSSSGTGKAGQQPARKRLNFGQTGDADSVPDPQPLGQPPAAPSGLGSTTMATGSGAPMADNNEGADGVGNSSGNWHCDSQWLGDRVITTSTRTWALPTYNNHLYKQISSQSGASNDNHYFGYSTPWGYFDFNRFHCHFSPRDWQRLINNNWGFRPKRLNFKLFNIQVKEVTQNDGTTTIANNLTSTVQVFTDSEYQLPYVLGSAHQGCLPPFPADVFMVPQYGYLTLNNGSQAVGRSSFYCLEYFPSQMLRTGNNFQFSYTFEDVPFHSSYAHSQSLDRLMNPLIDQYLYYLNKTQTNSGTLQQSRLLFSQAGPTNMSLQAKNWLPGPCYRQQRLSKQANDNNNSNFPWTAATKYHLNGRDSLVNPGPAMASRKDDEEKFFPMHGTLIFGKQGTNANDADLENVMITDEEEIRATNPVATEQYGTVSNNLQNSNTGPTTGTVNHQGALPGMVWQDRDVYLQGPIWAKIPHTDGHFHPSPLMGGFGLKHPPPQIMIKNTPVPANPPTNFSSAKFASFITQYSTGQVSVEIEWELQKENSKRWNPEIQYTSNYNKSVNVDFTVDTNGVYSEPRPIGTRYLTRNL

SEQ ID NO: 4906 - DNA, 2208 bp, Adeno-associated virus
  source 1..2208: mol_type = genomic DNA
atggctgccgatggttatcttccagattggctcgaggacactctctctgaaggaataagacagtggtggaagctcaaacctggcccaccaccaccaaagcccgcagagcggcataaggacgacagcaggggtcttgtgcttcctgggtacaagtacctcggacccttcaacggactcgacaagggagagccggtcaacgaggcagacgccgcggccctcgagcacgacaaagcctacgaccggcagctcgacagcggagacaacccgtacctcaagtacaaccacgccgacgcggagtttcaggagcgccttaaagaagatacgtcttttgggggcaacctcggacgagcagtcttccaggcgaaaaagagggttcttgaacctctgggcctggttggggaacctgtcaagacggctccaggaaaaaagaggccggtagagcactctcctgtggagccagactcctcctcgggaaccggaaaggcgggccagcagcctgcaagaaaaagattgaattttggtcagactggagacgcagactcagtacctgacccccagcctctcggacagccaccagcagccccctctggtctgggaactaatacgatggctacaggcagtggcgcaccaatggcagacaataacgagggcgccgacggagtgggtaattcctcgggaaattggcattgcgattccacatggatgggcgacagagtcatcaccaccagcacccgaacctgggccctgcccacctacaacaaccacctctacaaacaaatttccagccaatcaggagcctcgaacgacaatcactactttggctacagcaccccttgggggtattttgacttcaacagattccactgccacttttcaccacgtgactggcaaagactcatcaacaacaactggggattccgacccaagagactcaacttcaagctctttaacattcaagtcaaagaggtcacgcagaatgacggtacgacgacgattgccaataaccttaccagcacggttcaggtgtttactgactcggagtaccagctcccgtacgtcctcggctcggcgcatcaaggatgcctcccgccgttcccagcagacgtcttcatggtgccacagtatggatacctcaccctgaacaacgggagtcaggcagtaggacgctcttcattttactgcctggagtactttccttctcagatgctgcgtaccggaaacaactttaccttcagctacacttttgaggacgttcctttccacagcggctacgctcacagccagagtctggaccgtctcatgaatcctctcatcgaccagtacctgtattacttgagcacaacaaacactccaagtggaaccaccacgcagtcaaggcttcagttttctcaggccggagcgagtgacattcgggaccagtctaggaactggcttcctggaccctgttaccgccagcagcgagtatcaaagacatctgcggataacaacaacagtgaatactcgtggactggagctaccaagtaccacctcaatggcagagactctctggtgaatccgggcccggccatggcaagccacaaggacaatgaagaaaagttttttcctcagagcggggttctcatctttgggaagcaaggctcagagaaaacaaatgtggacattgaaaaggtcatgattacagacgaagaggaaatcaggacaaccaatcccgtggctacggagcagtacggttctgtatctaccaacctccagagaggcaacagacaagcagctaccgcagatgtcaacacacaaggcgttcttccaggcatggtctggcaggacagagatgtgtaccttcaggggcccatctgggcaaagattccacacacggacggacattttcacccctctcccctcatgggtggattcggacttaaacaccctcctccacagattctcatcaagaacaccccggtacctgcgaatccttcgaccaccttcagtgcggcaaagtttgcttccttcatcacacagtactccacgggacaggtcagcgtggagatcgagtgggagctgcagaaggaaaacagcaaacgctggaatcccgaaattcagtacacttccaactacaacaagtctgttaatgtggactttactgtggacactaatggcgtgtattcagagcctcgccccattggcaccagatacctgactcgtaatctgtaa

SEQ ID NO: 4907 - protein, 735 aa, Adeno-associated virus
MAADGYLPDWLEDTLSEGIRQWWKLKPGPPPPKPAERHKDDSRGLVLPGYKYLGPFNGLDKGEPVNEADAAALEHDKAYDRQLDSGDNPYLKYNHADAEFQERLKEDTSFGGNLGRAVFQAKKRVLEPLGLVGEPVKTAPGKKRPVEHSPVEPDSSSGTGKAGQQPARKRLNFGQTGDADSVPDPQPLGQPPAAPSGLGTNTMATGSGAPMADNNEGADGVGNSSGNWHCDSTWMGDRVITTSTRTWALPTYNNHLYKQISSQSGASNDNHYFGYSTPWGYFDFNRFHCHFSPRDWQRLINNNWGFRPKRLNFKLFNIQVKEVTQNDGTTTIANNLTSTVQVFTDSEYQLPYVLGSAHQGCLPPFPADVFMVPQYGYLTLNNGSQAVGRSSFYCLEYFPSQMLRTGNNFTFSYTFEDVPFHSGYAHSQSLDRLMNPLIDQYLYYLSTTNTPSGTTTQSRLQFSQAGASDIRDQSRNWLPGPCYRQQRVSKTSADNNNSEYSWTGATKYHLNGRDSLVNPGPAMASHKDNEEKFFPQSGVLIFGKQGSEKTNVDIEKVMITDEEEIRTTNPVATEQYGSVSTNLQRGNRQAATADVNTQGVLPGMVWQDRDVYLQGPIWAKIPHTDGHFHPSPLMGGFGLKHPPPQILIKNTPVPANPSTTFSAAKFASFITQYSTGQVSVEIEWELQKENSKRWNPEIQYTSNYNKSVNVDFTVDTNGVYSEPRPIGTRYLTRNL

SEQ ID NO: 4908 - DNA, 2208 bp, Adeno-associated virus
  source 1..2208: mol_type = genomic DNA
atggctgccgatggttatcttccagattggctcgaggacactctctctgaaggaataagacagtggtggaagctcaaacctggcccaccaccaccaaagcccgcagagcggcataaggacgacagcaggggtcttgtgcttcctgggtacaagtacctcggacccttcaacggactcgacaagggagagccggtcaacgaggcagacgccgcggccctcgagcacgacaaagcctacgaccggcagctcgacagcggagacaacccgtacctcaagtacaaccacgccgacgcggagtttcaggagcgccttaaagaagatacgtcttttgggggcaacctcggacgagcagtcttccaggcgaaaaagagggttcttgaacctctgggcctggttggggaacctgttaagacggctccgggaaaaaagaggccggtagagcactctcctgtggagccagactcctcctcgggaaccggaaaggcgggccagcagcctgcaagaaaaagattgaattttggtcagactggagacgcagactcagtacctgacccccagcctctcggacagccaccagcagccccctctggtctgggaactaatacgatggctacaggcagtggcgcaccaatggcagacaataacgagggcgccgacggagtgggtaattcctcgggaaatcggcattgcgattccacatggatgggcgacagagtcatcaccaccagcacccgaacctgggccctgcccacctacaacaaccacctctacagacaaatttccagccaatcaggagcctcgaacgacaatcactactttggctacagcaccccttgggggtattttgacttcaacagattccactgccacttttcaccacgtgactggcaaagactcatcaacaacaactggggattccgacccaagagactcaacttcaagctctttaacattcaagtcaaagaggtcacgcagaatgacggtacgacgacgattgccaataaccttaccagcacggttcaggtgtttactgactcggagtaccagctcccgtacgtcctcggctcggcgcatcaaggatgcctcccgccgttcccagcagacgtcttcatggtgccacagtatggatacctcaccctgagcaacgggagtcaggcagtaggacgctcttcattttactgcccggagtactttccttctcagatgctgcgtaccggaaacaactttaccttcagctacacttttgaggacgttcctttccacagcagctacgctcacagccagagtctggaccgtctcatgaatcctctcatcgaccagtacctgtattacttgagcacaacaaacactccaagtggaaccaccacgcagtcaaggcttcagttttctcaggccggagcgagtgacattcgggaccagtctaggaactggcttcctggaccctgttaccgccagcagcgagtatcaaagacatctgcggataacaacaacagtgaatactcgtggactggagctaccaagtaccacctcaatggcagagactctctggtgaatccgggcccggccatggcaagccacaaggacaatgaagaaaagttttttcctcagagcggggttctcatctttgggaagcaaggctcagagaaaacaaatgtggacattgaaaaggtcatgattacagacgaagaggaaatcaggacaaccaatcccgtggctacggagcagtatggttctgtatctaccaacctccagagaggcaacagacaagcagctaccgcagatgtcaacacacaaggcgttcttccaggcatggtctggcaggacagagatgtgtaccttcaggggcccatctgggcaaagattccacacacggacggacattttcacccctctcccctcatgggtggattcggacctaaacaccctcctccacagattctcatcaagaacaccccggtacctgcgaatccttcgaccaccttcagtgcggcaaagtttgcttccttcatcacacagtactccacgggacaggtcagcgtggagatcgagtgggagctgcagaaggaaaacagcaaacgctggaatcccgaaattcagtacacttccaactacaacaagtctgttaatgtggactttactgtggacactaatggcgtgtattcagagcctcgccccattggcaccagatacctgactcgtaatttgtaa

SEQ ID NO: 4909 - protein, 735 aa, Adeno-associated virus
MAADGYLPDWLEDTLSEGIRQWWKLKPGPPPPKPAERHKDDSRGLVLPGYKYLGPFNGLDKGEPVNEADAAALEHDKAYDRQLDSGDNPYLKYNHADAEFQERLKEDTSFGGNLGRAVFQAKKRVLEPLGLVGEPVKTAPGKKRPVEHSPVEPDSSSGTGKAGQQPARKRLNFGQTGDADSVPDPQPLGQPPAAPSGLGTNTMATGSGAPMADNNEGADGVGNSSGNRHCDSTWMGDRVITTSTRTWALPTYNNHLYRQISSQSGASNDNHYFGYSTPWGYFDFNRFHCHFSPRDWQRLINNNWGFRPKRLNFKLFNIQVKEVTQNDGTTTIANNLTSTVQVFTDSEYQLPYVLGSAHQGCLPPFPADVFMVPQYGYLTLSNGSQAVGRSSFYCPEYFPSQMLRTGNNFTFSYTFEDVPFHSSYAHSQSLDRLMNPLIDQYLYYLSTTNTPSGTTTQSRLQFSQAGASDIRDQSRNWLPGPCYRQQRVSKTSADNNNSEYSWTGATKYHLNGRDSLVNPGPAMASHKDNEEKFFPQSGVLIFGKQGSEKTNVDIEKVMITDEEEIRTTNPVATEQYGSVSTNLQRGNRQAATADVNTQGVLPGMVWQDRDVYLQGPIWAKIPHTDGHFHPSPLMGGFGPKHPPPQILIKNTPVPANPSTTFSAAKFASFITQYSTGQVSVEIEWELQKENSKRWNPEIQYTSNYNKSVNVDFTVDTNGVYSEPRPIGTRYLTRNL

SEQ ID NO: 4910 - DNA, 2205 bp, Adeno-associated virus
  source 1..2205: mol_type = genomic DNA
atggctgccgatggttatcttccagattggctcgaggacactctctctgaaggaataagacagtggtggaagctcaaacctggcccaccaccaccaaagcccgcagagcggcataaggacgacagcaggggtcttgtgcttcctgggtacaagtacctcggacccttcaacggactcgacaagggagagccggtcaacgaggcagacgccgcggccctcgagcacgacaaggcctacgaccggcagctcgacagcggagacaacccgtacctcaagtacaaccacgccgacgcggagtttcaggagcgtcttaaagaagatacgtcttttgggggcaacctcggacgagcagtcttccaggcgaaaaagagggttcttgaacctctgggcctggttgaggaacctgttaagacggctccgggaaaaaagaggccggtagagcactctcctgcggagccagactcctcctcgggaaccggaaaagcgggccagcagcctgcaagaaaaagactgaatttcggtcagactggagacgcagactccgtacctgacccccagcctctcagacagccaccagcagcccccacaagtttgggatctactacaatggctacaggcagtggcgcaccaatggcagacaataacgagggtgccgatggagtgggtaattcctcaggaaattggcattgcgattcccaatggctgggcgacagagtcatcaccaccagcacccgaacctgggccctgcccacctacaacaaccacctttacaagcaaatctccagccaatcaggagcctcaaacgacaaccactactttggctacagcaccccctgggggtattttgacttcaacagattccactgccacttttcaccacgtgactggcaaagactcatcaacaacaactggggattccgacccaagagactcaacttcaagctctttaacattcaagtcaaagaggtcacgcagaatgacggtacgacgacgattgccaataaccttaccagcacggttcaggtgtttactgactcggagtaccagctcccgtacgtcctcggctcggcgcatcaaggatgcctcccgccgtttccagcggacgtcttcatggtcccacagtatggatacctcaccctgaacaacgggagtcaggcggtaggacgctcttccttttactgcctggagtactttccttctcagatgctgcgtactggaaacaactttcagttcagctacacttttgaagacgtgcctttccacagcagctacgctcacagccagagtttggatcggctgatgaatcctctgatcgaccagtacctgtattatctaaacagaacacaaacagctagtggaactcagcagtctcggctactgtttagccaagctggacccacaagcatgtctcttcaagctaaaaactggctgcctggaccgtgttatcgccagcagcgtttgtcaaagcaggcaaacgacaacaacaacagcaactttccctggactggagctaccaagtactacctcaatggcagagactctttggtgaacccgggcccggccatggccagccacaaggacgatgaagaaaagtttttccccatgcatggaaccctaatatttggtaaagaaggaacaaatgctaccaacgcggaattggaaaatgtcatgattacagatgaagaggaaatcaggaccaccaatcccgtggctacagagcagtacggatatgtgtcaaataatttgcaaaactcaaatactgctgcaagtactgaaactgtgaatcaccaaggagcattacctggtatggtgtggcaggatcgagacgtgtacctgcagggacccatttgggccaagattcctcacaccgatggacactttcatccttctccactgatgggaggttttggactcaaacacccgcctcctcagattatgatcaaaaacactcccgttccagccaatcctcccacaaacttcagttctgccaagtttgcttccttcatcacacagtattccacgggacaggtcagcgtggagatcgagtgggagctgcagaaggagaacagcaaacgctggaatcccgaaattcagtacacttccaactacaacaaatctgttaatgtggactttactgtggacactaatggtgtgtattcagagcctcgccccattggcaccagatacctgactcgtaatctgtaa

SEQ ID NO: 4911 - protein, 734 aa, Adeno-associated virus
MAADGYLPDWLEDTLSEGIRQWWKLKPGPPPPKPAERHKDDSRGLVLPGYKYLGPFNGLDKGEPVNEADAAALEHDKAYDRQLDSGDNPYLKYNHADAEFQERLKEDTSFGGNLGRAVFQAKKRVLEPLGLVEEPVKTAPGKKRPVEHSPAEPDSSSGTGKAGQQPARKRLNFGQTGDADSVPDPQPLRQPPAAPTSLGSTTMATGSGAPMADNNEGADGVGNSSGNWHCDSQWLGDRVITTSTRTWALPTYNNHLYKQISSQSGASNDNHYFGYSTPWGYFDFNRFHCHFSPRDWQRLINNNWGFRPKRLNFKLFNIQVKEVTQNDGTTTIANNLTSTVQVFTDSEYQLPYVLGSAHQGCLPPFPADVFMVPQYGYLTLNNGSQAVGRSSFYCLEYFPSQMLRTGNNFQFSYTFEDVPFHSSYAHSQSLDRLMNPLIDQYLYYLNRTQTASGTQQSRLLFSQAGPTSMSLQAKNWLPGPCYRQQRLSKQANDNNNSNFPWTGATKYYLNGRDSLVNPGPAMASHKDDEEKFFPMHGTLIFGKEGTNATNAELENVMITDEEEIRTTNPVATEQYGYVSNNLQNSNTAASTETVNHQGALPGMVWQDRDVYLQGPIWAKIPHTDGHFHPSPLMGGFGLKHPPPQIMIKNTPVPANPPTNFSSAKFASFITQYSTGQVSVEIEWELQKENSKRWNPEIQYTSNYNKSVNVDFTVDTNGVYSEPRPIGTRYLTRNL

SEQ ID NO: 4912 - DNA, 3160 bp, Adeno-associated virus
  source 1..3160: mol_type = genomic DNA
acccttcactaaagggactagtcctgcaggtttaaacgaattcgcccttgctgcgtcaactggaccaatgagaactttcccttcaacgactgtgtcgacaagatggtgatttggtgggaggaggggaagatgaccgccaaggtcgtggagtcggccaaagccattctcggaggaagcaaggtgcgcgtggaccagaaatgcaagtcctcggcccagatagatccgactcccgtgatcgtcacctccaacaccaacatgtgcgccgtgattgacgggaactcaacgaccttcgaacaccagcagccgttgcaagaccggatgttcaaatttgaactcacccgccgtctggatcatgactttgggaaggtcaccaagcgggaagtcaaagactttttccggtgggcaaaggatcacgtggttgaggtggagcatgaattctacgtcaaaaagggtggagccaagaaaagacccgcccctagtgacgcagatataagtgagcccaaacgggtgcgcgagtcagttgcgcagccatcgacgtcagacgcggaagcttcgatcaactacgcggacaggtaccaaaacaaatgttctcgtcacgtgggcatgaatctgatgctgtttccctgcagacaatgcgagagaatgaatcaaaattcaaatatctgcttcactcacggacagaaagactgtttagagtgctttcccgtgtcagaatctcaacctgtttctgtcgtcaaaaaggcgtatcagaaactgtgctacattcatcatatcatgggaaaggtgccagacgcttgcactgcctgcgatctggtcaatgtggatttggatgactgcatctctgaacaataaatgatttaaatcaggtatggctgccgatggttatcttccagattggctcgaggacactctctctgaaggaataagacagtggtggaagctcaaacctggcccaccaccaccaaagcccgcagagcggcataaggacgacagcaggggtcttgtgcttcctgggtacaagtacctcggacccttcaacggactcgacaagggagagccggtcaacgaggcagacgccgcggccctcgagcacgacaaggcctacgaccggcagctcgacagcggagacaacccgtacctcaagtacaaccacgccgacgcggagtttcaggagcgtcttaaagaagatacgtcttttgggggcaacctcggacgagcagtcttccaggcgaaaaagagggttcttgaacctctgggcctggttgaggaacctgttaagacggctccgggaaaaaagaggccggtagagcactctcctgcggagccagactcctcctcgggaaccggaaaagcgggccagcagcctgcaagaaaaagactgaatttcggtcagactggagacgcagactccgtacctgacccccagcctctcagacagccaccagcagcccccacaagtttgggatctactacaatggctacaggcagtggcgcaccaatggcagacaataacgagggtgccgatggagtgggtaattcctcaggaaattggcattgcgattcccaatggctgggcgacagagtcatcaccaccagcacccgaacctgggccctgcccacctacaacaaccacctttacaagcaaatctccagccaatcaggagcctcaaacgacaaccactactttggctacagcaccccctgggggtattttgacttcaacagattccactgccacttttcaccacgtgactggcaaagactcatcaacaacaactggggattccgacccaagagactcaacttcaagctctttaacattcaagtcaaagaggtcacgcagaatgacggtacgacgacgattgccaataaccttaccagcacggttcaggtgtttactgactcggagtaccagctcccgtacgtcctcggctcggcgcatcaaggatgcctcccgccgtttccagcggacgtcttcatggtcccacagtatggatacctcaccctgaacaacgggagtcaggcggtaggacgctcttccttttactgcctggagtactttccttctcagatgctgcgtactggaaacaactttcagttcagctacacttttgaagacgtgcctttccacagcagctacgctcacagccagagtttggatcggctgatgaatcctctgatcgaccagtacctgtattatctaaacagaacacaaacagctagtggaactcagcagtctcggctactgtttagccaagctggacccacaagcatgtctcttcaagctaaaaactggctgcctggaccgtgttatcgccagcagcgtttgtcaaagcaggcaaacgacaacaacaacagcaactttccctggactggagctaccaagtactacctcaatggcagagactctttggtgaacccgggcccggccatggccagccacaaggacgatgaagaaaagtttttccccatgcatggaaccctaatatttggtaaagaaggaacaaatgctaccaacgcggaattggaaaatgtcatgattacagatgaagaggaaatcaggaccaccaatcccgtggctacagagcagtacggatatgtgtcaaataatttgcaaaactcaaatactgctgcaagtactgaaactgtgaatcaccaaggagcattacctggtatggtgtggcaggatcgagacgtgtacctgcagggacccatttgggccaagattcctcacaccgatggacactttcatccttctccactgatgggaggttttggactcaaacacccgcctcctcagattatgatcaaaaacactcccgttccagccaatcctcccacaaacttcagttctgccaagtttgcttccttcatcacacagtattccacgggacaggtcagcgtggagatcgagtgggagctgcagaaggagaacagcaaacgctggaatcccgaaattcagtacacttccaactacaacaaatctgttaatgtggactttactgtggacactaatggtgtgtattcagagcctcgccccattggcaccagatacctgactcgtaatctgtaattgcttgttaatcaataaaccgtttaattcgtttcagttgaactttggtctctgcgaagggcgaattcgcggccgctaaatcaatcg

SEQ ID NO: 4913 - protein, 734 aa, Adeno-associated virus
MAADGYLPDWLEDTLSEGIRQWWKLKPGPPPPKPAERHKDDSRGLVLPGYKYLGPFNGLDKGEPVNEADAAALEHDKAYDRQLDSGDNPYLKYNHADAEFQERLKEDTSFGGNLGRAVFQAKKRVLEPLGLVEEPVKTAPGKKRPVEHSPAEPDSSSGTGKAGQQPARKRLNFGQTGDADSVPDPQPLGQPPAAPTSLGSTTMATGSGAPMADNNEGADGVGNSSGNWHCDSQWLGDRVITTSTRTWALPTYNNHLYKQISSQSGASNDNHYFGYSTPWGYFDFNRFHCRFSPRDWQRLINNNWGFRPKRLNFKLFNIQVKEVTQNDGTTTIANNLTSTVQVFTDSEYQLPYVLGSAHQGCLPPFPADVFMVPQYGYLTLNNGSQAVGRSSFYCLEYFPSQMLRTGNNFQFSYTFEDVPFHSSYAHSQGLDRLMNPLIDQYLYYLNRTQTASGTQQSRLLFSQAGPTSMSLQAKNWLPGPCYRQQRLSKQANDNNNSNFPWTGATKYHLNGGDSLVNPGPAMASHKDDEEKFFPMHGTLIFGKEGTNATNAELENVMITDEEEIRTTNPVATEQYGYVSNNLQNSNTAASTETVNHQGALPGMVWQDRDVYLRGPIWAKIPHADGHFHPSPLMGGFGLKHPPPQIMIKNTPVPANPPTNFSSAKFASFITQYSTGQVSVEIEWELQKENSKRWNPEIQYTSNYNKSVNVDFTVDTNGVYSEPRPIGTRYLTRNL

SEQ ID NO: 4914 - DNA, 3157 bp, Adeno-associated virus
  source 1..3157: mol_type = genomic DNA
ctcactaagggactagtcctgcaggtttaaacgaattcgcccttgctgcgtcaactggaccaatgagaactttcccttcaacgactgtgtcgacaagatggtgatttggtgggaggaggggaagatgaccgccaaggtcgtggagtcggccaaagccactctcggaggaagcaaggtgcgcgtggaccagaaacgcaagtcctcggcccagatagatccgactcccgtgatcgtcacctccaacaccaacatgtgcgccgtgattgacgggaactcaacgaccttcgaacaccagcagccgttgcaagaccgaatgttcaaatttgaactcacccgccgtctggatcatgacttcgggaaggtcaccaagcaggaagtcaaagactttttccggtgggcaaaggatcacgtggttgaggtggagcatgaattctacgtcaaaaagggtggagccaagaaaagacccgcccctagtgacgcagatataagtgagcccaaacgggtgcgcgagtcagttgcgcagccatcgacgtcagacgcggaagcttcgatcaactacgcggacaggtaccaaaacaaatgttctcgtcacgtgggcatgaatctgatgctgtttccctgcagacaatgcgagagaatgaatcaaaattcaaatatctgcttcactcacggacagaaagactgtttagagtgctttcccgtgtcagaatctcaacctgtttctgtcgtcaaaaaggcgtatcagaaactgtgctacattcatcatatcatgggaaaggtgccagacgcttgcactgcctgcgatctggtcaatgtggatttggatgactgcatctctgaacaataaatgatttaaatcaggtatggctgccgatggttatcttccagattggctcgaggacactctctctgaaggaataagacagtggtggaagctcaaacctggcccaccaccaccaaagcccgcagagcggcataaggacgacagcaggggtcttgtgcttcctgggtacaagtacctcggacccttcaacggactcgacaagggagagccggtcaacgaggcagacgccgcggctctcgagcacgacaaggcctacgaccggcagctcgacagcggagacaacccgtacctcaagtacaaccacgccgacgcggagtttcaggagcgtcttaaagaagatacgtcttttgggggcaacctcggacgagcagtcttccaggcgaaaaagagggttcttgaacctctgggcctggttgaggaacctgttaagacggctccgggaaaaaagaggccggtagagcactctcctgcggagccagactcctcctcgggaaccggaaaagcgggccagcagcctgcaagaaaaagactgaatttcggtcagactggagacgcagactccgtacctgacccccagcctctcggacagccaccagcagcccccacaagtttgggatctactacaatggctacaggcagtggcgcaccaatggcagacaataacgagggtgccgatggagtgggtaattcctcaggaaattggcattgcgattcccaatggctgggcgacagagtcatcaccaccagcacccgaacctgggccctgcccacctacaacaaccacctttacaagcaaatctccagccaatcaggagcctcaaacgacaaccactactttggctacagcaccccctgggggtattttgacttcaacagattccactgccgcttttcaccacgtgactggcaaagactcatcaacaacaactggggattccgacccaagagactcaacttcaagctctttaacattcaagtcaaagaggtcacgcagaatgacggtacgacgacgattgccaataaccttaccagcacggttcaggtgtttactgactcggagtaccagctcccgtacgtcctcggctcggcgcatcaaggatgcctcccgccgtttccagcggacgtcttcatggtcccacagtatggatacctcaccctgaacaacgggagtcaggcggtaggacgctcttccttttactgcctggagtactttccttctcagatgctgcgtactggaaacaactttcagttcagctacacttttgaagacgtgcctttccacagcagctacgctcacagccagggtttggatcggctgatgaatcctctgatcgaccagtacctgtattatctaaacagaacacaaacagctagtggaactcagcagtctcggctactgtttagccaagctggacccacaagcatgtctcttcaagctaaaaactggctgcctggaccgtgttatcgccagcagcgtttgtcaaagcaggcaaacgacaacaacaacagcaactttccctggactggagctaccaagtaccacctcaatggcggagactctttggtgaacccgggcccggccatggccagccacaaggacgatgaagaaaagtttttccccatgcatggaaccctaatatttggtaaagaaggaacaaatgctaccaacgcggaattggaaaatgtcatgattacagatgaagaggaaatcaggaccaccaatcccgtggctacagagcagtacggatatgtgtcaaataatttgcaaaactcaaatactgctgcaagtactgaaactgtgaatcaccaaggagcattacctggtatggtgtggcaggatcgagacgtgtacctgcggggacccatttgggccaagattcctcacgccgatggacactttcatccttctccactgatgggaggttttggactcaaacacccgcctcctcagattatgatcaaaaacactcccgttccagccaatcctcccacaaacttcagttctgccaagtttgcttccttcatcacacagtattccacgggacaggtcagcgtggagatcgagtgggagctgcagaaggagaacagcaaacgctggaatcccgaaattcagtacacttccaactacaacaaatctgttaatgtggactttactgtggacactaatggtgtgtattcagagcctcgccccattggcaccagatacctgactcgtaatctgtaattgcttgttaatcaataaaccgtttaattcgtttcagttgaactttggtctctgcgaagggcgaattcgcggccgctaaattcaattcg

SEQ ID NO: 4915 - protein, 734 aa, Adeno-associated virus
MAADGYLPDWLEDTLSEGIRQWWKLKPGPPPPKPAERHKDDSRGLVLPGYKYLGPFNGLDKGEPVNEADAAALEHDKAYDRQLDSGDNPYLKYNHADAEFQERLKEDTSFGGNLGRAVFQAKKRVLEPLGLVEEPVKTAPGKKRPVEHSPAEPDSSSGTGKAGQQPARKRLNFGQTGDADSVPDPQPLGQPPAAPTSLGSTTMATGSGAPMADNNEGADGVGNSSGNWHCDSQWLGDRVITTSTRTWALPTYNNHLYKQISSQSGASNDNHYFGYSTPWGYFDFNRFHCHFSPRDWQRLINNNWGFRPKRLNFKLFNIQVKEVTQNDGTTTIANNLTSTVQVFTDSEYQLPYVLGSAHQGCLPPFPADVFMVPQYGYLTLNNGSQAVGRSSFYCLECFPSQMLRTGNNFQFSYTFEDVPFHSSYAHSQSLDRLMNPLIDQYLYYLNRTQTASGTQQSRLLFSQAGPTSMSLQAKNWLPGPCYRQQRLSKQANDNNNSNFPWTGATKYHLNGRDSLVNPGPAMASHKDDEEKFFPMHGTLIFGKEGTNATNAELENVMITDEEEIRTTNPVATEQYGYVSNNLQNSNTAASTETVNHQGALPGMVWQDRDVYLQGPIWAKIPHTDGHFHPSPLMGGFGLKHPPPQIMIKNTPVPANPPTNFSSAKFASFITQYSTGQVSVEIEWELQKENSKRWNPEIQYTSNYNKSVNVDFTVDTNGVYSEPRPIGTRYLTRNL

SEQ ID NO: 4916 - DNA, 2208 bp, Adeno-associated virus
  source 1..2208: mol_type = genomic DNA
atggctgccgatggttatcttccagattggctcgaggacactctctctgaaggaataagacagtggtggaagctcaaacctggcccaccaccaccaaagcccgcagagcggcataaggacgacagcaggggtcttgtgcttcctggatacaagtacctcggacccttcaacggactcgacaagggagagccggtcaacgaggcagacgccgcggccctcgagcacgacaaggcctacgaccggcagctcgacagcggagacaacccgtacctcaagtacaaccacgccgacgcggagtttcaggagcgccttaaagaagatacgtcttttgggggcaacctcggacgagcagtcttccaggcgaaaaagagggttcttgaacctctgggcctggttgaggaacctgttaagacggctccgggaaaaaagaggccggtagagcactctcctgtggagccagactcctcctcgggaaccggaaaagcgggcaaccagcctgcaagaaaaagattgaatttcggtcagactggagacgcagactccgtacctgacccccagcctctcggacagccaccagcatccccctctggtctgggaactaatacgatggctacaggcagtggcgcaccaatggcagacaataacgagggcgccgacggagtgggtaattcctcgggaaattggcattgcgattccacatggatgggcgacagagtcgtcaccaccagcacccgcacctgggccctgcccacctacaacaaccacctctacaagcagatttccagccaatcaggagccagcaacgacaaccactactttggctacagcaccccttgggggtattttgacttcaacagattccactgccacttttcgccacgcgactggcagagactcatcaacaacaactggggattccggcccaaaagactcaacttcaagctgtttaacattcaagtcaaggaggtcacgcagaatgacggtacgacgacgattgccaataaccttaccagcacggttcaggtgtttactgacttggagtaccagctcccgtacgtcctcggctcggcgcatcaaggatgcctcccgccgttcccagcagacgtcttcatggtgccacagtatggatacctcaccctgaacaacgggagtcaggcggtaggacgctcttccttttactgcctggagtactttccttctcagatgcttcgcaccggaaacaactttaccttcagctacacttttgaagacgttcctttccacagcagctacgctcacagtcaaagtctggaccgtctcatgaatcctctcatcgaccagtacctgtattacttgagcagaacaaacactccaagcggaaccactacgcagtccaggcttcagttttctcaggccggagcgagtgacattcgggaccagtctaggaactggcttcctggaccctgttaccgccagcagcgagtatcaaagacagctgcggataacaacaacagtgaatactcgtggactggagctaccaagtaccacctcaatggcagagactctctggtgaatccgggcccggccatggccagccacaaggacgatgaagaaaagttttttcctcaaagcggggttctcatctttgggaagcaaggctcagagaaaacaaatgtggacattgaaaaggtcatgattacagacgaagaggaaatcaggaccaccaatcccgtggctacggagcagtatggttctgtatctaccaacctccagagcggcaacacacaagcagctacctcagatgtcaacacacaaggcgttcttccaggcatggtctggcaggacagagacgtgtacctgcaggggcccatctgggcaaaaattccacacacggacggacattttcacccctctcccctcatgggcggatttggacttaaacaccctcctccacagattctcattaagaataccccggtacctgcgaatccttcgaccaccttcagcgcggcaaagtttgcttccttcatcacacagtattccacggggcaggtcagcgtggagatcgagtgggagctgcagaaggagaacagcaaacgctggaatcccgaaattcagtacacttccaactacaacaaatctgttaatgtggactttactgtggacactaatggggtgtattcagagcctcgccctattggcaccagatacctgactcgtaatctgtaa

SEQ ID NO: 4917 - DNA, 3159 bp, Adeno-associated virus
  source 1..3159: mol_type = genomic DNA
gattgatttagcggccgcgaattcgcccttgctgcgtcaactggaccaatgagaactttcccttcaacgattgcgtcgacaagatggtgatctggtgggaggagggaaagatgaccgccaaggtcgtggagtcggccaaagccattctcggaggaagcaaggtgcgtgtggaccaaaagtgcaagtcttcggcccagatcgacccgactcccgtgatcgtcacctccaacaccaacatgtgcgccgtgattgatggaaactcaacgaccttcgagcaccagcagccgttgcaagaccggatgttcaaatttgaacttacccgccgtctggatcatgactttggaaaggtcaccaagcaggaagtgaaagactttttccggtgggcaaaggatcacgtggttgaggtggagcatgagttctacgtcaaaaagggtggagccaaaaaaagacccgcccccagtgacgcagatataagtgagcccaaacgggcgcgcgagtcagttgcgcagccatcgacgtcagacgcggaagcttcgatcaactacgcggacaggtaccaaaacaaatgttctcgtcacgtgggcatgaatctgatgctgtttccctgcagacaatgcgagagaatgaatcagaattcaaatatctgcttcactcacggacagaaagactgtccatagtgctttcccgtgtcagaatctcaacccgtttctgtcgtcaaaaaggcgtatcagaaactgtgctacattcatcacatcatgggaaaggtgccagacgcttgcactgcttgcgacctggtcaatgtggatttggatgactgcatctctgaacaataaatgatttaaatcaggtatggctgccgatggttatcttccagattggctcgaggacactctctctgaaggaataagacagtggtggaagctcaaacctggcccaccaccaccaaagcccgcagagcggcataaggacgacagcaggggtcttgtgcttcctggatacaagtacctcggacccttcaacggactcgacaagggagagccggtcaacgaggcagacgccgcggccctcgagcacgacaaggcctacgaccggcagctcgacagcggagacaacccgtacctcaagtacaaccacgccgacgcggagtttcaggagcgccttaaagaagatacgtcttttgggggcaacctcggacgagcagtcttccaggcgaaaaagagggttcttgaacctctgggcctggttgaggaacctgttaagacggctccgggaaaaaagaggccggtagagcactctcctgtggagccagactcctcctcgggaaccggaaaagcgggcaaccagcctgcaagaaaaagattgaatttcggtcagactggagacgcagactccgtacctgacccccagcctctcggacagccaccagcatccccctctggtctgggaactaatacgatggctacaggcagtggcgcaccaatggcagacaataacgagggcgccgacggagtgggtaattcctcgggaaattggcattgcgattccacatggatgggcgacagagtcgtcaccaccagcacccgcacctgggccctgcccacctacaacaaccacctctacaagcagatttccagccaatcaggagccagcaacgacaaccactactttggctacagcaccccttgggggtattttgacttcaacagattccactgccacttttcgccacgcgactggcagagactcatcaacaacaactggggattccggcccaaaagactcaacttcaagctgtttaacattcaagtcaaggaggtcacgcagaatgacggtacgacgacgattgccaataaccttaccagcacggttcaggtgtttactgacttggagtaccagctcccgtacgtcctcggctcggcgcatcaaggatgcctcccgccgttcccagcagacgtcttcatggtgccacagtatggatacctcaccctgaacaacgggagtcaggcggtaggacgctcttccttttactgcctggagtactttccttctcagatgcttcgcaccggaaacaactttaccttcagctacacttttgaagacgttcctttccacagcagctacgctcacagtcaaagtctggaccgtctcatgaatcctctcatcgaccagtacctgtattacttgagcagaacaaacactccaagcggaaccactacgcagtccaggcttcagttttctcaggccggagcgagtgacattcgggaccagtctaggaactggcttcctggaccctgttaccgccagcagcgagtatcaaagacagctgcggataacaacaacagtgaatactcgtggactggagctaccaagtaccacctcaatggcagagactctctggtgaatccgggcccggccatggccagccacaaggacgatgaagaaaagttttttcctcaaagcggggttctcatctttgggaagcaaggctcagagaaaacaaatgtggacattgaaaaggtcatgattacagacgaagaggaaatcaggaccaccaatcccgtggctacggagcagtatggttctgtatctaccaacctccagagcggcaacacacaagcagctacctcagatgtcaacacacaaggcgttcttccaggcatggtctggcaggacagagacgtgtacctgcaggggcccatctgggcaaaaattccacacacggacggacattttcacccctctcccctcatgggcggatttggacttaaacaccctcctccacagattctcattaagaataccccggtacctgcgaatccttcgaccaccttcagcgcggcaaagtttgcttccttcatcacacagtattccacggggcaggtcagcgtggagatcgagtgggagctgcagaaggagaacagcaaacgctggaatcccgaaattcagtacacttccaactacaacaaatctgttaatgtggactttactgtggacactaatggggtgtattcagagcctcgccctattggcaccagatacctgactcgtaatctgtaattgcttgttaatcaataaaccgtttaattcgtttcagttgaactttggtctctgcgaagggcgaattcgtttaaacctgcaggactagtccctttagtgagg

SEQ ID NO: 4918 - protein, 735 aa, Adeno-associated virus
MAADGYLPDWLEDTLSEGIRQWWKLKPGPPPPKPAERHKDDSRGLVLPGYKYLGPFNGLDKGEPVNEADAAALEHDKAYDRQLDSGDNPYLKYNHADAEFQERLKEDTSFGGNLGRAVFQAKKRVLEPLGLVEEPVKTAPGKKRPVEHSPVEPDSSSGTGKAGNQPARKRLNFGQTGDADSVPDPQPLGQPPASPSGLGTNTMATGSGAPMADNNEGADGVGNSSGNWHCDSTWMGDRVVTTSTRTWALPTYNNHLYKQISSQSGASNDNHYFGYSTPWGYFDFNRFHCHFSPRDWQRLINNNWGFRPKRLNFKLFNIQVKEVTQNDGTTTIANNLTSTVQVFTDLEYQLPYVLGSAHQGCLPPFPADVFMVPQYGYLTLNNGSQAVGRSSFYCLEYFPSQMLRTGNNFTFSYTFEDVPFHSSYAHSQSLDRLMNPLIDQYLYYLSRTNTPSGTTTQSRLQFSQAGASDIRDQSRNWLPGPCYRQQRVSKTAADNNNSEYSWTGATKYHLNGRDSLVNPGPAMASHKDDEEKFFPQSGVLIFGKQGSEKTNVDIEKVMITDEEEIRTTNPVATEQYGSVSTNLQSGNTQAATSDVNTQGVLPGMVWQDRDVYLQGPIWAKIPHTDGHFHPSPLMGGFGLKHPPPQILIKNTPVPANPSTTFSAAKFASFITQYSTGQVSVEIEWELQKENSKRWNPEIQYTSNYNKSVNVDFTVDTNGVYSEPRPIGTRYLTRNL

SEQ ID NO: 4919 - DNA, 2205 bp, Adeno-associated virus
  source 1..2205: mol_type = genomic DNA
atggctgccgatggttatcttccagattggctcgaggacactctctctgaaggaataagacagtggtggaagctcaaacctggcccaccaccaaagcccgcagagcggcataaggacgacagcaggggtcttgtgcttcctggatacaagtacctcggacccttcaacggactcgacaagggagagccggtcaacgaggcagacgccgcggccctcgagcacgacaaggcctacgaccggcagctcgacagcggagacaacccgtacctcaagtacaaccacgccgacgcggagtttcaggagcgccttaaagaagatacgtcttttgggggcaacctcggacgagcagtcttccaggcgaaaaagagggttcttgaacctctgggcctggttgaggaacctgttaagacggctccgggaaaaaagaggcccgtagagcactctcctgtggagccagactcctcctcgggaaccggaaaagcgggcaaccagcctgcaagaaaaagattgaatttcggtcagactggagacgcagactccgtacctgacccccagcctctcggacagccaccagcagccccctctggtctgggaactaatacgatggctacaggcagtggcgcaccaatggcagacaataacgagggcgccgacggagtgggtaattcctcgggagattggcattgcgattccacatggatgggcgacagagtcatcaccaccagcacccgcacctgggccctgcccacctacaacaaccacctctacaagcagatttccagccaatcaggagccagcaatgacaaccactactttggctacagcaccccttgggggtattttgacttcaacagattccactgccacttttcgccacgcgactggcagagactcatcaacaacaactggggattccggcccaaaagactcaacctcaagctgtttaacattcaagtcaaggaggtcacgcagaatgacggtacgacgacgattgccaataaccttaccagcacggttcaggtgtttactgacttggagtaccagctcccgtacgtcctcggctcggcgcatcaaggatgcctcccgccgttcccagcagacgtcttcatggtgccacagtatggatacctcaccctgaacaacgggagtcaggcggtaggacgctcttccttttactgcctggagtactttccttctcagatgcttcgtaccggaaacaactttaccttcagctacacttttgaagacgttcctttccacagcagctacgctcacagtcaaagtctggaccgtctcatgaatcctctcatcgaccagtacctgtattacttgagcagaacaaacactccaagcggaaccactacgcagtccaggcttcagttttctcaggccggagcgagtgacattcgggaccagtctaggaactggcttcctggaccctgttaccgccagcagcgagtatcaaagacagctgcggataacaacaacggtgaatactcgtggactggagctaccaagtaccacctcaatggcagagactctctggtgaatccgggcccggccatggccagccacaaggacgatgaagaaaagttttttcctcaaagcggggttctcatctttgggaagcaaggctcagagaaaacaaatgtggacattgaaaaggtcatgattacagacgaagaggaaatcaggaccaccaatcccgtggctacggagcagtatggttctgtatctaccaacctccagagcggcaacacacgagcagctacctcagatgtcaacacacaaggcgttcttccaggcatggtctggcaggacagagacgtgtacctgcaggggcccatctgggcaaaaattccacacacggacggacattttcacccctctcccctcatgggcggatttggacttaaacaccctcctccacagattctcattaagaataccccggtacctgcgaatccttcgaccaccttcagcgcggcaaagtttgcttccttcatcacacagtattccacggggcaggtcagcgtggagatcgagtgggagctgcagaaggagaacagcaaacgctggaatcccgaaattcagtacacttccaactacaacaaatctgttaatgtggactttactgtggacactaatggggtgtattcagagcctcgccctattggcaccagatacctgactcgtaatctgtaa

SEQ ID NO: 4920 - DNA, 3156 bp, Adeno-associated virus
  source 1..3156: mol_type = genomic DNA
cgattgaatttagcggccgcgaattcgcccttgctgcgtcaacggaccaatgagaactttcccttcaacgattgcgtcgacaagatggtgatctggtgggaggagggaaagatgaccgccaaggtcgtggagtcggccaaagccattctcggaggaagcaaggtgcgtgtggaccaaaagtgcaagtcttcggcccagatcgacccgactcccgtgatcgtcacctccaacaccaacatgtgcgccgtgattgatggaaactcaacgaccttcgagcaccagcagccgttgcaagaccggatgttcaaatttgaacttacccgccgtctggatcatgactttggaaaggtcaccaagcaggaagtgaaagactttttccggtgggcaaaggatcacgtggttgaggtggagcatgagttctacgtcaaaaagggtggagccaaaaaaagacccgcccccagtgacgcagatataagtgagcccaaacgggcgcgcgagtcagttgcgcagccatcgacgtcagacgcggaagcttcgatcaactacgcggacaggtaccaaaacaaatgttctcgtcacgtgggcatgaatctgatgctgtttccctgcagacaatgcgagcgaatgaatcagaattcaaatatctgcttcactcacggacagaaagactgtttagagtgctttcccgtgtcagaatctcaacccgtttctgtcgtcaaaaaggcgtatcagaaactgtgctacattcatcacatcatgggaaaggtgccagacgcttgcactgcttgcgacctggtcaatgtggatttggatgactgcatctctgaacaataaatgatttaaatcaggtatggctgccgatggttatcttccagattggctcgaggacactctctctgaaggaataagacagtggtggaagctcaaacctggcccaccaccaaagcccgcagagcggcataaggacgacagcaggggtcttgtgcttcctggatacaagtacctcggacccttcaacggactcgacaagggagagccggtcaacgaggcagacgccgcggccctcgagcacgacaaggcctacgaccggcagctcgacagcggagacaacccgtacctcaagtacaaccacgccgacgcggagtttcaggagcgccttaaagaagatacgtcttttgggggcaacctcggacgagcagtcttccaggcgaaaaagagggttcttgaacctctgggcctggttgaggaacctgttaagacggctccgggaaaaaagaggcccgtagagcactctcctgtggagccagactcctcctcgggaaccggaaaagcgggcaaccagcctgcaagaaaaagattgaatttcggtcagactggagacgcagactccgtacctgacccccagcctctcggacagccaccagcagccccctctggtctgggaactaatacgatggctacaggcagtggcgcaccaatggcagacaataacgagggcgccgacggagtgggtaattcctcgggagattggcattgcgattccacatggatgggcgacagagtcatcaccaccagcacccgcacctgggccctgcccacctacaacaaccacctctacaagcagatttccagccaatcaggagccagcaatgacaaccactactttggctacagcaccccttgggggtattttgacttcaacagattccactgccacttttcgccacgcgactggcagagactcatcaacaacaactggggattccggcccaaaagactcaacctcaagctgtttaacattcaagtcaaggaggtcacgcagaatgacggtacgacgacgattgccaataaccttaccagcacggttcaggtgtttactgacttggagtaccagctcccgtacgtcctcggctcggcgcatcaaggatgcctcccgccgttcccagcagacgtcttcatggtgccacagtatggatacctcaccctgaacaacgggagtcaggcggtaggacgctcttccttttactgcctggagtactttccttctcagatgcttcgtaccggaaacaactttaccttcagctacacttttgaagacgttcctttccacagcagctacgctcacagtcaaagtctggaccgtctcatgaatcctctcatcgaccagtacctgtattacttgagcagaacaaacactccaagcggaaccactacgcagtccaggcttcagttttctcaggccggagcgagtgacattcgggaccagtctaggaactggcttcctggaccctgttaccgccagcagcgagtatcaaagacagctgcggataacaacaacggtgaatactcgtggactggagctaccaagtaccacctcaatggcagagactctctggtgaatccgggcccggccatggccagccacaaggacgatgaagaaaagttttttcctcaaagcggggttctcatctttgggaagcaaggctcagagaaaacaaatgtggacattgaaaaggtcatgattacagacgaagaggaaatcaggaccaccaatcccgtggctacggagcagtatggttctgtatctaccaacctccagagcggcaacacacgagcagctacctcagatgtcaacacacaaggcgttcttccaggcatggtctggcaggacagagacgtgtacctgcaggggcccatctgggcaaaaattccacacacggacggacattttcacccctctcccctcatgggcggatttggacttaaacaccctcctccacagattctcattaagaataccccggtacctgcgaatccttcgaccaccttcagcgcggcaaagtttgcttccttcatcacacagtattccacggggcaggtcagcgtggagatcgagtgggagctgcagaaggagaacagcaaacgctggaatcccgaaattcagtacacttccaactacaacaaatctgttaatgtggactttactgtggacactaatggggtgtattcagagcctcgccctattggcaccagatacctgactcgtaatctgtaattgcttgttaatcaataaaccgtttaattcgtttcagttgaactttggtctctgcgaagggcgaattcgtttaaacctgcaggactagtccctttagtgag

SEQ ID NO: 4921 - protein, 734 aa, Adeno-associated virus
MAADGYLPDWLEDTLSEGIRQWWKLKPGPPPKPAERHKDDSRGLVLPGYKYLGPFNGLDKGEPVNEADAAALEHDKAYDRQLDSGDNPYLKYNHADAEFQERLKEDTSFGGNLGRAVFQAKKRVLEPLGLVEEPVKTAPGKKRPVEHSPVEPDSSSGTGKAGNQPARKRLNFGQTGDADSVPDPQPLGQPPAAPSGLGTNTMATGSGAPMADNNEGADGVGNSSGDWHCDSTWMGDRVITTSTRTWALPTYNNHLYKQISSQSGASNDNHYFGYSTPWGYFDFNRFHCHFSPRDWQRLINNNWGFRPKRLNLKLFNIQVKEVTQNDGTTTIANNLTSTVQVFTDLEYQLPYVLGSAHQGCLPPFPADVFMVPQYGYLTLNNGSQAVGRSSFYCLEYFPSQMLRTGNNFTFSYTFEDVPFHSSYAHSQSLDRLMNPLIDQYLYYLSRTNTPSGTTTQSRLQFSQAGASDIRDQSRNWLPGPCYRQQRVSKTAADNNNGEYSWTGATKYHLNGRDSLVNPGPAMASHKDDEEKFFPQSGVLIFGKQGSEKTNVDIEKVMITDEEEIRTTNPVATEQYGSVSTNLQSGNTRAATSDVNTQGVLPGMVWQDRDVYLQGPIWAKIPHTDGHFHPSPLMGGFGLKHPPPQILIKNTPVPANPSTTFSAAKFASFITQYSTGQVSVEIEWELQKENSKRWNPEIQYTSNYNKSVNVDFTVDTNGVYSEPRPIGTRYLTRNL

SEQ ID NO: 4922 - DNA, 2208 bp, Adeno-associated virus
  source 1..2208: mol_type = genomic DNA
atggctgccgatggttatcttccagattggctcgaggacactctctctgaaggaataagacagtggtggaagctcaaacctggcccaccaccaccaaagcccgcagagcggcataaggacgacagcaggggtcttgtgcttcctgggtacaagtacctcggacccttcaacggactcgacaagggagagccggtcaacgaggcagacgccgcggccctcgagcacgacaaggcctacgaccggcagctcgacagcggagacaacccgtacctcaagtacgaccacgccgacgcggagtttcaggagcgccttaaagaagatacgtcttttgggggcaacctcggacgagcagtcttccaggcaaaaaagagggttcttgaacctctgggcctggttgaggagcctgttaagacggctccgggaaaaaagaggccggtagagcactctcctgtggagccagactcctcctcgggaaccggaaaagcgggcaaccagcctgcaagaaagagattgaatttcggtcagactggagacgcagactccgtacctgacccccagcctctcggacagccaccagcagccccctctggtctgggaactaatacgatggctacaggcagtggcgcaccaatggcagacaataacgatggcgccgacggagtgggtaattcctcgggaaattggcattgcgattccacatggatgggcgacagagtcatcaccaccagcacccgaacctgggctctgcccacctacaacaaccatctgtacaagcagatttccagccaatcaggagccagcaacgacaaccactactttggctacagcaccccttgggggtattttgacttcaacagattccactgccacttttcaccacgtgactggcaaagactcatcaacaacaactggggattccggcccaagagactcaacttcaagctctttaacattcaagtcagagaggtcacgcagaatgatggtacgacgacgattgccaataaccttaccagcacggttcaggtgtttactgactcggagtaccagctcccgtacgtcctcggctcggcgcatcaaggatgcctcccgccgttcccagcagacgtcttcatggtgccacagtatggatacctcaccctgaacaacgggagtcaggcagtaggacgctcttcattttactgcctggagtacttcccttctcagatgctgcgtaccggaaacaactttaccttcagctacacctttgaggatgttcctttccacagcagctacgctcacagccagagtttggaccgtctcatgaatcctctcatcgaccagtacctgtattacttgagcagaacaaacactccaagcggaaccaccacgcagtccaggcttcagttttctcaggccggagcgagtgacattcgggatcagtctaggaactggcttcctggaccctgttaccgccagcagcgagtatcaaagacatctgcggacaacaacaacagtgaatactcgtggattggagctaccaagtaccacctcaatggcagagactctctggtgaatccgggcccggcaatggccagccacaaggacgatgaagaaaagttttttcctcagagcggggttctcatctttggaaaacaaggatcagagaaaacaaatgtggacattgaaaaggtcatgattacagacgaagaggaaatcagaaccaccaatcccgtggccacggagcagtatggttctgtatctaccaacctccagagcggcaacacacaagcatctactgcagatgtcaacacacaaggcgttcttccaggcatggtctggcaggacagagacgtgtacctgcaggggcctatctgggcaaagattccgcacacggacggacattttcacccctctcccctcatgggcggattcggacttaaacaccctcctccacagattctcatcaaaaacaccccggtacctgcgaatccttcgaccaccttcagtgcggcaaagtttgcttccttcatcacacagtattccacggggcgggtcagcgtggagatcgagtgggagctacagaaggagaacagcaaacgctggaatcccgagatccagtacacttccaactacaacaaatctgttaatgtggactttactgtggacactaatggtgtgtattcagagcctcgccccattggcaccagatacctgactcgtaatctgtaa

SEQ ID NO: 4923 - protein, 735 aa, Adeno-associated virus
MAADGYLPDWLEDTLSEGIRQWWKLKPGPPPPKPAERHKDDSRGLVLPGYKYLGPFNGLDKGEPVNEADAAALEHDKAYDRQLDSGDNPYLKYDHADAEFQERLKEDTSFGGNLGRAVFQAKKRVLEPLGLVEEPVKTAPGKKRPVEHSPVEPDSSSGTGKAGNQPARKRLNFGQTGDADSVPDPQPLGQPPAAPSGLGTNTMATGSGAPMADNNDGADGVGNSSGNWHCDSTWMGDRVITTSTRTWALPTYNNHLYKQISSQSGASNDNHYFGYSTPWGYFDFNRFHCHFSPRDWQRLINNNWGFRPKRLNFKLFNIQVREVTQNDGTTTIANNLTSTVQVFTDSEYQLPYVLGSAHQGCLPPFPADVFMVPQYGYLTLNNGSQAVGRSSFYCLEYFPSQMLRTGNNFTFSYTFEDVPFHSSYAHSQSLDRLMNPLIDQYLYYLSRTNTPSGTTTQSRLQFSQAGASDIRDQSRNWLPGPCYRQQRVSKTSADNNNSEYSWIGATKYHLNGRDSLVNPGPAMASHKDDEEKFFPQSGVLIFGKQGSEKTNVDIEKVMITDEEEIRTTNPVATEQYGSVSTNLQSGNTQASTADVNTQGVLPGMVWQDRDVYLQGPIWAKIPHTDGHFHPSPLMGGFGLKHPPPQILIKNTPVPANPSTTFSAAKFASFITQYSTGRVSVEIEWELQKENSKRWNPEIQYTSNYNKSVNVDFTVDTNGVYSEPRPIGTRYLTRNL

SEQ ID NO: 4924 - DNA, 2217 bp, Adeno-associated virus
  source 1..2217: mol_type = genomic DNA
atggctgccgatggttatcttccagattggctcgaggacaacctctctgagggcattcgcgagtggtgggacttgaaacctggagccccgaaacccaaagccaaccagcaaaagcaggacgacggccggggtctggtgcttcctggctacaagtacctcggacccttcaacggactcgacaagggggagcccgtcaacgcggcggacgcagcggccctcgagcacgacaaggcctacgaccagcagctcaaagcgggtgacaatccgtacctgcggtataaccacgccgacgccgagtttcaggagcgtctgcaagaagatacgtcttttgggggcaacctcgggcgagcagtcttccaggccaagaagcgggttctcgaacctctcggtctggttgaggaaggcgctaagacggctcctggaaagaagagaccggtagagccatcaccccagcgttctccagactcctctacgggcatcggcaagacaggccagcagcccgcgaaaaagagactcaactttgggcagactggcgactcagagtcagtgcccgaccctcaaccaatcggagaaccccccgcaggcccctctggtctgggatctggtacaatggctgcaggcggtggcgctccaatggcagacaataacgaaggcgccgacggagtgggtagttcctcaggaaattggcattgcgattccgcatggctgggcgacagagtcatcaccaccagcacccgaccctgggccctccccacctacaacaaccacctctacaagcaaatctccaacgggacatcgggaggaagcaccaacgacaacacctacttcggctacagcaccccctgggggtattttgactttaacagattccactgccacttctcaccacgtgactggcagcgactcatcaacaacaactggggattccggcccaagagactcaacttcaagctcttcaacatccaggtcaaggaggtcacgcagaatgaaggcaccaagaccatcgccaataaccttaccagcacgattcaggtctttacggactcggaataccagctcccgtacgtcctcggctctgcgcaccagggctgcccgcctccgttcccggcggacgtcttcatgattcctcagtacgggtacctgactctgaacaacggcagtcaggccgtgggccgttcctccttctactgcctggagtactttccttctcaaatgcggagaacgggcaacaactttgagttcagctaccagtttgaggacgtgccttttcacagcagctacgcgcatagccaaagcctggaccggctgatgaaccccctcatcgaccagtacctgtactacctgtctcggactcagtccacgggaggtaccgcaggaactcagcagttgctattttctcaggccgggcctaataacatgtcggctcaggccaaaaactggctacccgggccctgctaccggcagcaacgcgtctccacgacactgtcgcaaaataacaacagcaactttgcttggaccggtgccaccaagtatcatctgaatggcagagactctctggtaaatcccggtgtcgctatggcaacgcacaaggacgacgaagagcgattttttccatccagcggagtcttgatgtttgggaaacagggagctggaaaagacaacgtggactatagcagcgttatgctaaccagtgaggaagaaatcaaaaccaccaacccagtggccacagaacagtacggcgtggtggccgataacctgcaacagcaaaacgccgctcctattgtaggggccgtcaacagtcaaggagccttacctggcatggtctggcagaaccgggacgtgtacctgcagggtcctatctgggccaagattcctcacacggacggcaactttcatccttcgccgctgatgggaggctttggactgaaacacccgcctcctcagatcctgattaagaatacacctgttcccgcggatcctccaactaccttcagtcaagccaagctggcgtcgttcatcacgcagtacagcaccggacaggtcagcgtggaaattgaatgggagctgcagaaagagaacagcaagcgctggaacccagagattcagtatacttccaactactacaaatctacaaatgtggactttgctgtcaatactgagggtacttattcagagcctcgccccattggcacccgttacctcacccgtaacctgtaa

SEQ ID NO: 4925 - protein, 738 aa, Adeno-associated virus
MAADGYLPDWLEDNLSEGIREWWDLKPGAPKPKANQQKQDDGRGLVLPGYKYLGPFNGLDKGEPVNAADAAALEHDKAYDQQLKAGDNPYLRYNHADAEFQERLQEDTSFGGNLGRAVFQAKKRVLEPLGLVEEGAKTAPGKKRPVEPSPQRSPDSSTGIGKTGQQPAKKRLNFGQTGDSESVPDPQPIGEPPAGPSGLGSGTMAAGGGAPMADNNEGADGVGSSSGNWHCDSAWLGDRVITTSTRPWALPTYNNHLYKQISNGTSGGSTNDNTYFGYSTPWGYFDFNRFHCHFSPRDWQRLINNNWGFRPKRLNFKLFNIQVKEVTQNEGTKTIANNLTSTIQVFTDSEYQLPYVLGSAHQGCPPPFPADVFMIPQYGYLTLNNGSQAVGRSSFYCLEYFPSQMRRTGNNFEFSYQFEDVPFHSSYAHSQSLDRLMNPLIDQYLYYLSRTQSTGGTAGTQQLLFSQAGPNNMSAQAKNWLPGPCYRQQRVSTTLSQNNNSNFAWTGATKYHLNGRDSLVNPGVAMATHKDDEERFFPSSGVLMFGKQGAGKDNVDYSSVMLTSEEEIKTTNPVATEQYGVVADNLQQQNAAPIVGAVNSQGALPGMVWQNRDVYLQGPIWAKIPHTDGNFHPSPLMGGFGLKHPPPQILIKNTPVPADPPTTFSQAKLASFITQYSTGQVSVEIEWELQKENSKRWNPEIQYTSNYYKSTNVDFAVNTEGTYSEPRPIGTRYLTRNL

SEQ ID NO: 4926 - protein, 735 aa, Adeno-associated virus
MAADGYLPDWLEDTLSEGIRQWWKLKPGPPPPKPAERHKDDSRGLVLPGYKYLGPFNGLDKGEPVNEADAAALEHDKAYDRQLDSGDNPYLKYNHADAEFQERLKEDTSFGGNLGRAVFQAKKRVLEPLGLVEEPVKTAPGKKRPVEHSPVEPDSSSGTGKAGQQPARKRLNFGQTGDADSVPDPQPLGQPPAAPSGLGSTTMATGSGAPMADNNEGADGVGNSSGNWHCDSQWLGDRVITTSTRTWALPTYNNHLYKQISSQSGASNDNHYFGYSTPWGYFDFNRFHCHFSPRDWQRLINNNWGFRPKRLNFKLFNIQVKEVTQNDGTTTIANNLTSTVQVFTDSEYQLPYVLGSAHQGCLPPFPADVFMVPQYGYLTLNNGSQAVGRSSFYCLEYFPSQMLRTGNNFQFSYTFEDVPFHSSYAHSQSLDRLMNPLVDQYLYYLNKTQTNSGTLQQSRLLFSQAGPTNMSLQAKNWLPGPCYRQQRLSKQANDNNNSNFPWTAATKYHLNGRDSLVNPGPAMASHKDDEEKFFPMHGTLIFGKQGTNANDADLENVMITDEEEIRTTNPVATEQYGTVSNNLQNSNTGPTTGTVNHQGALPGMVWQDRDVYLQGPIWAKIPHTDGHFHPSPLMGGFGLKHPPPQIMIKNTPVPANPPTNFSSAKFASFITQYSTGQVSVEIEWELQKENSKRWNPEIQYTSNYNKSVNVDFTVDTNGVYSEPRPIGTRYLTRNL

SEQ ID NO: 4927 - DNA, 3158 bp, Adeno-associated virus
  source 1..3158: mol_type = genomic DNA
gattgaatttagcggccgcgaattcgcccttgctgcgtcaactggaccaatgagaactttcctttcaatgattgcgtcgacaagatggtgatctggtgggaggagggaaagatgaccgccaaggtcgtggagtcggccaaagccattctcggaggaagcaaggtgcgcgcggaccagaaatgcaagtcctcggcccagatagacccgactcccgtgattgtcacctccaacaccaacatgtgcgccgtgattgacgggaactcaacgaccttcgaacaccagcagccgttgcaagaccggatgttcaaatttgaactcacccgccgtctggatcatgactttgggaaggtcaccaagcaggaagtcaaagactttttccggtgggcaaaggatcacgtggttgaggtggagcatgaattctacgtcaaaaagggtggagctaagaaaagacccgcccccagtgacgcagatataagtgagcccaaacgggcgcgcgagtcagttgcgcagccatcgacgtcagacgcggaagcttcgatcaactacgcgggcaggtaccaaaacaaatgttctcgtcacgtgggcatgaatctgatgctgtttccctgcagacaatgcgagagaatgaatcagaattcaaatatctgcttcactcacggacagaaagactgtttagagtgctttcccgtgtcagaatctcaacccgtttctgtcgtcaaaaaggcgtatcagaaactttgctacattcatcatatcatgggaaaggtgccagacgcttgcactgcctgcgatctggtcaatgtggatttggatgactgcatctctgaacaataaatgatttaaatcaggtatggctgccgatggttatcttccagattggctcgaggacactctctctgaaggaataagacagtggtggaagctcaaacctggcccaccaccaccaaagcccgcagagcggcataaggacgacagcaggggtcttgtgcttcctgggtacaagtacctcggacccttcaacggactcgacaagggggagccggtcaacgaggcagacgccgcggccctcgagcacgacaaggcctacgaccggcagctcgacagcggagacaacccgtacctcaagtacaaccacgccgacgcggagtttcaggagcgccttaaagaagatacgtcttttgggggcaacctcggacgagcagtcttccaggcaaaaaagagggttcttgaacctctgggcctggttgaggaacctgttaaaacggctccgggaaaaaagaggccggtagagcactctcctgtggagccagactcctcctcgggaaccggaaaagcgggccagcagcctgcaagaaaaagattgaatttcggtcagactggagacgcagactccgtacctgacccccagcctctcggacagccaccagcagccccctctggtctgggatctactacaatggctacaggcagtggcgcaccaatggcagacaataacgagggtgccgatggagtgggtaattcctcgggaaattggcattgcgattcccaatggctgggcgacagagtcatcaccaccagcacccgcacctgggccctgcccacctacaacaaccacctctacaagcaaatctccagccaatcaggagcctcaaacgacaaccactactttggctacagcaccccctgggggtattttgacttcaacagattccactgccacttttcaccacgtgactggcaaagactcatcaacaacaactggggattccgacccaagagactcaacttcaagctctttaacattcaagtcaaagaggtcacgcagaatgacggtacgacgacgattgccaataaccttaccagcacggttcaggtgtttactgactcggagtaccagctcccgtacgtcctcggctcggcgcatcaaggatgcctcccgccgtttccagcggacgtcttcatggtcccacagtatggatacctcaccctgaacaacgggagtcaggcagtaggacgctcttcattttactgcctggagtactttccttctcagatgctgcgtaccggaaacaactttcaattcagctacacttttgaagacgtgcctttccacagcagctacgctcacagccagagtctggatcggctgatgaatcctctggtcgaccagtacctgtattatctgaacaagacacaaacaaatagtggaactcttcagcagtctcggctactgtttagccaagctggacccaccaacatgtctcttcaagctaaaaactggctgcctggaccttgctacagacagcagcgtctgtcaaagcaggcaaacgacaacaacaacagcaactttccctggactgcagctacaaagtatcatctaaatggccgggactcgttggttaatccaggaccagctatggccagtcacaaggatgacgaagaaaagtttttccccatgcatggaacccttatatttggtaaacaaggaacaaatgccaacgacgcggatttggaaaatgtcatgattacagatgaagaagaaatcaggaccaccaatcccgtggctacggagcagtacggaactgtatcaaataatttgcaaaactcaaacactggtccaactactggaactgtcaatcaccaaggagcgttacctggtatggtgtggcaggatcgagacgtgtacctgcagggacccatttgggccaagattcctcacaccgatggacactttcatccttctccactgatgggaggttttggactcaaacacccacctcctcaaatcatgatcaaaaacactcccgttccagccaatcctcccacaaacttcagttctgccaagtttgcttctttcatcacacagtattccacggggcaggtcagcgtggagatcgagtgggagctgcagaaggagaacagcaaacgctggaatcccgaaattcagtacacttccaactacaacaaatctgttaatgtggactttactgtggacactaatggtgtgtattcagagcctcgccccattggcaccagatacctgactcgtaatctgtaattgcttgttaatcaataaaccgtttaattcgtttcagttgaactttggtctctgcgaagggcgaattcgtttaaacctgcaggactagtccctttagtga

SEQ ID NO: 4928 - protein, 735 aa, Adeno-associated virus
MAADGYLPDWLEDTLSEGIRQWWKLKPGPPPPKPAERHKDDSRGLVLPGYKYLGPFNGLDKGEPVNEADAAALEHDKAYDRQLDSGDNPYLKYNHADAEFQERLKEDTSFGGNLGRAVFQAKKRVLEPLGLVEEPVKTAPGKKRPVEHPPVEPDSSSGTGKAGQQPARKRLNFGQTGDADSVPDPQPLGQPPAAPSGLGSTTMATGSGAPMADNNEGADGVGNSSGNWHCDSQWLGDRVITTSTRTWALPTYNNHLYKQISSQSGASNDNHYFGYSTPWGYFDFNRFHCHFSPRDWQRLINNNWGFRPKRLNFKLFNIQVKEVTQNDGTTTIANNLTSTVQVFTDSEYQLPYVLGSAHQGCLPPFPADVFMVPQYGYLTLNNGSQAVGRSSFYCLEYFPSQMLRTGNNFQFSYTFEDVPFHSSYAHSQSLDRLMNPLIDQYLYYLNKTQTNSGTLQQSRLLFSQAGPTNMSLQAKNRLPGPCYRQQRLSKQANDNNNSNFPWTAATKYHLNGRDSLVNPGPAMASHKDDEEKFFPMHGTLIFGKQGTNANDADLENVMITDEEEIRTTNPVATEQYGTVSNNLQNSNTGPTTGTVNHQGALPGMVWQDRDVYLQGPIWAKIPHTDGHFHPSPLVGGFGLKHPPPQIMIKNTPVPANPPTNFSSAKFASFITQYSTGQVSVEIEWELQKENSKRWNPEIQYTSNYNKSVNVDFTVDTNGVYSEPRPIGTRYLTRNL

SEQ ID NO: 4929 - DNA, 3159 bp, Adeno-associated virus
  source 1..3159: mol_type = genomic DNA
gattgaatttagcggccgcgaattcgcccttgctgcgtcaactggaccaatgagaactttcctttcaatgattgcgtcgacaagatggtgatctggtgggaggagggaaagatgaccgccaaggtcgtggagtcggccaaagccattctcggaggaagcaaggtgcgcgtggaccagaaatgcaagtcctcggcccagatagacccgactcccgtgattgtcacctccaacaccgacatgtgcgccgtgattgacgggaactcaacgaccttcgaacaccagcagccgttgcaagaccggatgttcaaatttgaactcacccgccgtctggatcatgactttgggaaggtcaccaagcaggaagtcaaagactttttccggtgggcaaaggatcacgtggttgaggtggagcatgaattctacgtcaaaaagggtggagctaagaaaagacccgcccccagtgacgcagatataagtgagcccaaacgggcgcgcgagtcagttgcgcagccatcgacgtcagacgcggaagcttcgatcaactacgcggacaggtaccaaaacaaatgttctcgtcacgtgggcatgaatctgatgctgtttccctgcagacaatgcgagagaatgaatcagaattcaaatatctgcttcactcacggacagaaagactgtttagagtgctttcccgtgtcagaatctcaacccgtttctgtcgtcaaaaaggcgtatcagaaactttgctacattcatcatatcatgggaaaggtgccagacgcttgcactgcctgcgatctggtcaatgtggatttggatgactgcatctctgaacaataaatgatttaaatcaggtatggctgccgatggttatcttccagattggctcgaggacactctctctgaaggaataagacagtggtggaagctcaaacctggcccaccaccaccaaagcccgcagagcggcataaggacgacagcaggggtcttgtgcttcctgggtacaagtacctcggacccttcaacggactcgacaagggggagccggtcaacgaggcagacgccgcggccctcgagcacgacaaggcctacgaccggcagctcgacagcggagacaacccgtacctcaagtacaaccacgccgacgcggagtttcaggagcgccttaaagaagatacgtcttttgggggcaacctcggacgagcagtcttccaggcaaaaaagagggttcttgaacctctgggcctggttgaggaacctgttaaaacggctccgggaaaaaagaggccggtagagcaccctcctgtggagccagactcctcctcgggaaccggaaaagcgggccagcagcctgcaagaaaaagattgaatttcggtcagactggagacgcagactccgtacctgacccccagcctctcggacagccaccagcagccccctctggtctgggatctactacaatggctacaggcagtggcgcaccaatggcagacaataacgagggtgccgatggagtgggtaattcctcgggaaattggcattgcgattcccaatggctgggcgacagagtcatcaccaccagcacccgcacctgggccctgcccacctacaacaaccacctctacaagcaaatctccagccaatcaggagcctcaaacgacaaccactactttggctacagcaccccctgggggtattttgacttcaacagattccactgccacttttcaccacgtgactggcaaagactcatcaacaacaactggggattccgacccaagagactcaacttcaagctctttaacattcaagtcaaagaggtcacgcagaatgacggtacgacgacgattgccaataaccttaccagcacggttcaggtgtttactgactcggagtaccagctcccgtacgtcctcggctcggcgcatcaaggatgcctcccgccgtttccagcggacgtcttcatggtcccacagtatggatacctcaccctgaacaacgggagtcaggcagtaggacgctcttcattttactgcctggagtactttccttctcagatgctgcgtaccggaaacaactttcagttcagctacacttttgaagacgtgcctttccacagcagctacgctcacagccagagtctggatcggctgatgaatcctctgatcgaccagtacctgtattatctgaacaagacacaaacaaatagtggaactcttcagcagtctcggctactgtttagccaagctggacccaccaacatgtctcttcaagctaaaaaccggctgcctggaccttgctacagacagcagcgtctgtcaaagcaggcaaacgacaacaacaacagcaactttccctggaccgcagctacaaagtatcatctaaatggccgggactcgttggttaatccaggaccagctatggccagtcacaaggatgacgaagaaaagtttttccccatgcatggaacccttatatttggtaaacaaggaacaaatgccaacgacgcggatttggaaaatgtcatgattacagatgaagaagaaatcaggaccaccaatcccgtggctacggagcagtacggaactgtatcaaataatttgcaaaactcaaacactggtccaactactggaactgtcaatcaccaaggagcgttacctggtatggtgtggcaggatcgagacgtgtacctgcagggacccatttgggccaagattcctcacaccgatggacactttcatccttctccactggtgggaggttttggactcaaacacccacctcctcaaatcatgatcaaaaacactcccgttccagccaatcctcccacaaacttcagttctgccaagtttgcttctttcatcacacagtattccacggggcaggtcagcgtggagatcgagtgggagctgcagaaggagaacagcaaacgctggaatcccgaaattcagtacacttccaactacaacaaatctgttaatgtggactttactgtggacactaatggtgtgtattcagagcctcgccccattggcaccagatacctgactcgtaatctgtaattgcttgttaatcaataaaccgtttaattcgtttcagttgaactttggtctctgcgaagggcgaattcgtttaaacctgcaggactagtccctttagtgag

SEQ ID NO: 4930 - DNA, 2208 bp, Adeno-associated virus
  source 1..2208: mol_type = genomic DNA
atggctgccgatggttatcttccagattggctcgaggacactctctctgaaggaataagacagtggtggaagctcaaacctggcccaccaccaccaaagcccgcagagcggcataaggacgacagcaggggtcttgtgcttcctgggtacaagtaccttggacccttcaacggactcgacaagggagagccggtcaacgaggcagacgccgcggccctcgagcacgacaaggcctacgaccggcagctcgacagcggagacaacccgtaccccaagtacaaccacgccgacgcggagttccaggagcgtcttaaagaagatacgtcttttgggggcaacctcggacgagcagtcttccaggcgaaaaagagggttcttgaacctctgggcctggttgaggaacctgttaagacggctccgggaaaaaagaggccggtagagcactctcctgcggagccagactcctcctcgggaaccggaaaagcgggccagcagcctgcaagaaagagattgaatttcggtcagactggagacgcagactccgtacctgacccccagcctctcggacagccaccagcagccccctctggtctgggaactaatacgatggctacaggcagtggcgcaccaatggcagacaataacgagggcgccgacggagtgggtaattcctcgggaaattggcattgcgattccacatggatgggcgacagagtcatcaccaccagcacccgcacctgggctctgcccacctacaacaaccacctctacaagcagatttccagccaatcaggagcctcaaacgacaaccactactttggctacagcaccccttgggggtattttgacttcaacagattccactgccacttttcgccacgtgactggcaaagactcatcaacaacaattggggattccggcccaaaagactcaacttcaagctctttaacattcaagtcaaggaggtcacgcagaatgacggtacgacgacgattgccaataaccttaccagcacggttcaggtgtttactgactcggagtaccagctcccgtacgtcctcggctcggcgcatcaaggatgcctcccgccgttcccagcagacgtcttcatggtgccacagtatggatacctcaccctgaacaacgggagtcaggcagtaggacgctcttcattttactgcctggagtactttccttctcagatgctgcgtaccggaaacaactttaccttcagctacacctttgaggacgttcctttccacagcagctacgcccacagccagagtttggaccgtctcatgaatcctctcatcgaccagtacctgtattacttgagcagaacaaacactccaagcggaaccaccacgcagtcaaggcttcagttttctcaggccggagcaagtgacattcgggaccagtctaggaactggcttcctggaccctgttaccgccagcagcgagtatcaaagacatctgcggataacaacaacagtgaatactcgtggactggagctaccaagtaccaccttaatggaagagactctctggtgaatccgggcccggccatggccagccacaaggacgatgaagaaaagttttttcctcagagcggggttctcatctttggaaaacaagactcgggaaaaactaatgtggacattgaaaaggtcatgattacagacgaagaggaaatcaggaccaccaatcccgtggctacggagcagtatggttctgtatctaccaacctccagagcggcaacacacaagcagctacctcagatgtcaacacacaaggcgttcttccaggcatggtgtggcaggacagagacgtgtacctgcaggggcccatctgggcaaagattccacacacggacggacattttcacccctctcccctcatgggcggattcggacttaaacaccctcccccgcagattctcatcaagaacaccccggtacctgcgaatccttcgactaccttcagtgcggcaaagtttgcttccttcattacacagtactccacggggcaggtcagcgtggagatcgagtgggagctgcagaaggagaacagcaaacgctggaatcccgagattcagtacacttccaactacaacaaatctgttaatgtggactttactgtggacactaatggtgtgtattcagagcctcgccccattggcaccaggtacctgactcgtaatctgtaa

SEQ ID NO: 4931 - protein, 735 aa, Adeno-associated virus
MAADGYLPDWLEDTLSEGIRQWWKLKPGPPPPKPAERHKDDSRGLVLPGYKYLGPFNGLDKGEPVNEADAAALEHDKAYDRQLDSGDNPYPKYNHADAEFQERLKEDTSFGGNLGRAVFQAKKRVLEPLGLVEEPVKTAPGKKRPVEHSPAEPDSSSGTGKAGQQPARKRLNFGQTGDADSVPDPQPLGQPPAAPSGLGTNTMATGSGAPMADNNEGADGVGNSSGNWHCDSTWMGDRVITTSTRTWALPTYNNHLYKQISSQSGASNDNHYFGYSTPWGYFDFNRFHCHFSPRDWQRLINNNWGFRPKRLNFKLFNIQVKEVTQNDGTTTIANNLTSTVQVFTDSEYQLPYVLGSAHQGCLPPFPADVFMVPQYGYLTLNNGSQAVGRSSFYCLEYFPSQMLRTGNNFTFSYTFEDVPFHSSYAHSQSLDRLMNPLIDQYLYYLSRTNTPSGTTTQSRLQFSQAGASDIRDQSRNWLPGPCYRQQRVSKTSADNNNSEYSWTGATKYHLNGRDSLVNPGPAMASHKDDEEKFFPQSGVLIFGKQDSGKTNVDIEKVMITDEEEIRTTNPVATEQYGSVSTNLQSGNTQAATSDVNTQGVLPGMVWQDRDVYLQGPIWAKIPHTDGHFHPSPLMGGFGLKHPPPQILIKNTPVPANPSTTFSAAKFASFITQYSTGQVSVEIEWELQKENSKRWNPEIQYTSNYNKSVNVDFTVDTNGVYSEPRPIGTRYLTRNL

SEQ ID NO: 4932 - DNA, 2208 bp, Adeno-associated virus
  source 1..2208: mol_type = genomic DNA
atggctgccgatggttatcttccagattggctcgaggacactctctctgaaggaataagacagtggtggaagctcaaacctggcccaccaccaccaaagcccgcagagcggcataaggacgacagcaggggtcttgtgcttcctgggtacaagtaccttggacccttcaacggactcgacaagggagagccggtcaacgaggcagacgccgcggccctcgagcacgacaaggcctacgaccggcagctcgacggcggagacaacccgtacctcaagtacaaccacgccgacgcggagttccaggagcgtcttaaagaagatacgtcttttgggggcaacctcggacgagcagtcttccaggcgaaaaagagggttcttgaacctctgggcctggttgaggaacctgttaagacggctccgggaaaaaagaggccggtagagcactctcttgcggagccagactcctcctcgggaaccggaaaagcgggccagcagcctgcaagaaggagattgaatttcggtcagactggagacgcagactccgtacctgacccccagcctctcggacagccaccagcagccccctctggtctgggaactaatacgatggctacaggcagtggcgcaccaatggcagacaataacgagggcgccgacggagtgggtaattcctcgggaaattggcattgcgattccacatggatgggcgacagagtcatcaccaccagcacccgcacctgggctctgcccacctacaacaaccacctctacaggcagatttccagccaatcaggagcctcaaacgacaaccactactttggctacagcaccccttgggggtattttgacttcaacagattccactgccacttttcgccacgtgactggcaaagactcatcaacaacaattggggatcccggcccaaaagactcaacttcaagctctttaacattcaagtcaaggaggtcacgcagaatgacggtacgacgacgattgccaataaccttaccagcacggttcaggtgtttactgactcggagtaccagctcccgtacgtcctcggctcggcgcatcaaggatgcctcccgccgttcccagcagacgtcttcatggtgccacagtatggatacctcaccctgaacaacgggagtcaggcagtaggacgctcttcattttactgcctggagtactttccttctcagatgctgcgtaccggaaacaactttaccttcagctacacctttgaggacgttcctttccacagcagctacgcccacagccagagtttggaccgtctcatgaatcctctcgtcgaccagtacctgtattacttgagcagaacaaacactccaagcggaaccaccacgcagtcaaggcttcagttttctcaggccggagcaagtgacattcgggaccagtctaggaactggcttcctggaccctgttaccgccagcagcgagtatcaaagacatctgcggataacaacaacagtgaatactcgtggactggagctaccaagtaccaccttaatggaagagactctctggtgaatccgggcccggccatggccagccacaaggacgatgaagaaaagttttttcctcagagcggggttctcatctttggaaaacaagactcgggaaaaactaatgtggacattgaaaaggtcatgattacagacgaagaggaaatcaggaccaccaatcccgtggctacggagcagtatggttctgtatctaccaacctccagagcggcaacacacaagcagctacctcagatgtcaacacacaaggcgttcttccaggcatggtgtggcaggacagagacgtgtacctgcaggggcccatctgggcaaagattccacacacggacggacattttcacccctctcccctcatgggcggattcggacttaaacaccctcccccgcagattctcatcaagaacaccccggtacctgcgaatccttcgactaccttcagtgcggcaaagtttgcttccttcattacacagtactccacggggcaggtcagcgtggagatcgagtgggagctgcagaaggagaacagcaaacgctggaatcccgagattcagtacacttccaactacaacaaatctgttaatgtggactttactgtggacactaatggtgtgtattcagagcctcgccccattggcaccagatacctgactcgtaatctgtaa

SEQ ID NO: 4933 - protein, 735 aa, Adeno-associated virus
MAADGYLPDWLEDTLSEGIRQWWKLKPGPPPPKPAERHKDDSRGLVLPGYKYLGPFNGLDKGEPVNEADAAALEHDKAYDRQLDGGDNPYLKYNHADAEFQERLKEDTSFGGNLGRAVFQAKKRVLEPLGLVEEPVKTAPGKKRPVEHSLAEPDSSSGTGKAGQQPARRRLNFGQTGDADSVPDPQPLGQPPAAPSGLGTNTMATGSGAPMADNNEGADGVGNSSGNWHCDSTWMGDRVITTSTRTWALPTYNNHLYRQISSQSGASNDNHYFGYSTPWGYFDFNRFHCHFSPRDWQRLINNNWGSRPKRLNFKLFNIQVKEVTQNDGTTTIANNLTSTVQVFTDSEYQLPYVLGSAHQGCLPPFPADVFMVPQYGYLTLNNGSQAVGRSSFYCLEYFPSQMLRTGNNFTFSYTFEDVPFHSSYAHSQSLDRLMNPLVDQYLYYLSRTNTPSGTTTQSRLQFSQAGASDIRDQSRNWLPGPCYRQQRVSKTSADNNNSEYSWTGATKYHLNGRDSLVNPGPAMASHKDDEEKFFPQSGVLIFGKQDSGKTNVDIEKVMITDEEEIRTTNPVATEQYGSVSTNLQSGNTQAATSDVNTQGVLPGMVWQDRDVYLQGPIWAKIPHTDGHFHPSPLMGGFGLKHPPPQILIKNTPVPANPSTTFSAAKFASFITQYSTGQVSVEIEWELQKENSKRWNPEIQYTSNYNKSVNVDFTVDTNGVYSEPRPIGTRYLTRNL

SEQ ID NO: 4934 - protein, 738 aa, Adeno-associated virus
MAADGYLPDWLEDNLSEGIREWWDLKPGAPKPKANQQKQDDGRGLVLPGYKYLGPFNGLDKGEPVNAADAAALEHDKAYDQQLKAGDNPYLRYNHADAEFQERLQEDTSFGGNLGRAVFQAKKRVLEPLGLVEEAAKTAPGKKRPVEPSPQRSPDSSAGIGKKGQQPAKKRLNFGQTGDSESVPDPQPIGEPPAGPSGLGSGTMAAGGGAPMADNNEGADGVGSSSGNWHCDSTWLGDRVITTSTRTWALPTYNNHLYKQISNGTSGGSTNDNTYFGYSTPWGYFDFNRFHCHFSPRDWQRLINNNWGFRPKRLSFKLFNIQVKEVTQNEGTETIANNLTSTIQVFTDSEYQLPYVLGSAHQGCLPPFPADVFMIPQYGYLTLNNGSQAVGRSSFYCLEYFPSQMLRTGNNFEFSYTFEDVPFHSSCAHSQSSDRLMNPLIDQYLYYLSRTRSTGGTQGTQQLLFSQAGPANMSAQAKNWLPGPCYRQQRVSTTLSQNNNSNFAWTGATKYHLNGRDSLVNPGVAMATHKDDEERFFPSSGVLMFGKQGAGRDNVDYSSVMLTSEEEIKTTNPVATEQYGVVADNLQQTNTGPIVGNVNSQGALPGMVWQNRDVYLQGPIWAKIPHTDGNFHPSPLMGGFGLKHPPPQILIKNTPVPADPPTTFSQAKLASFITQYSTGQVSVEIEWELQKENSKRWNPEIQYTSNYYKSTNVDFAVNTEGTYSEPRPIGTRYLTRNL

SEQ ID NO: 4935 - DNA, 2217 bp, Adeno-associated virus
  source 1..2217: mol_type = genomic DNA
atggctgctgacggttatcttccagattggctcgaggacaacctctctgagggcattcgcgagtggtgggacctgaaacctggagcccccaagcccaaggccaaccagcagaagcaggacgacggccggggtctggtgcttcttggctacaagtacctcggacccttcaacggactcgacaagggggagcccgtcaatgcggcggacgcagcggccctcgagcacgacaaggcctacgaccagcagctcaaagcgggtgacaatccgtacctgcggtataaccacgccgacgccgagtttcaggagcgtctgcaagaagatacgtcttttgggggcaacctcgggcgagcagtcttccaggccaagaagcgggttctcgaacctctcggtctggttgaggaagctgctaagacggctcctggaaagaagagaccggtagaaccgtcacctcagcgttcccccgactcctccacgggcatcggcaagaaaggccagcagcccgctaaaaagagactgaactttggtcagactggcgactcagagtcagtccccgaccctcaaccaatcggagaaccaccagcaggcccctctggtctgggatctggtacaatggctgcaggcggtggcgctccaatggcagacaataacgaaggcgccgacggagtgggtagttcctcaggaaattggcattgcgattccacatggctgggcgacagagtcatcaccaccagcacccgaacctgggccctgcccacctacaacaaccacctctacaagcaaatatccaatgggacatcgggaggaagcaccaacgacaacacctacttcggctacagcaccccctgggggtattttgacttcaacagattccactgccacttctcaccacgtgactggcagcgactcatcaacaacaactggggattccggccaaaaagactcagcttcaagctcttcaacatccaggtcaaggaggtcacgcagaatgaaggcaccaagaccatcgccaataaccttaccagcacgattcaggtatttacggactcggaataccagctgccgtacgtcctcggctccgcgcaccagggctgcctgcctccgttcccggcggacgtcttcatgattccccagtacggctaccttacactgaacaatggaagtcaagccgtaggccgttcctccttctactgcctggaatattttccatctcaaatgctgcgaactggaaacaattttgaattcagctacaccttcgaggacgtgcctttccacagcggctacgcacacagccagagcttggaccgactgatgaatcctctcatcgaccagtacctgtactacttatccagaactcagtccacaggaggaactcaaggtacccagcaattgttattttctcaagctgggcctgcaaacatgtcggctcaggctaagaactggctacctggaccttgctaccggcagcagcgagtctctacgacactgtcgcaaaacaacaacagcaactttgcttggactggtgccaccaaatatcacctgaacggaagagactctttggtaaatcccggtgtcgccatggcaacccacaaggacgacgaggaacgcttcttcccgtcgagtggagtcctgatgtttggaaaacagggtgctggaagagacaatgtggactacagcagcgttatgctaaccagcgaagaagaaattaaaaccactaaccctgtagccacagaacaatacggtgtggtggctgacaacttgcagcaaaccaatacagggcctattgtgggaaatgtcaacagccaaggagccttacctggcatggtctggcagaaccgagacgtgtacctgcagggtcccatctgggccaagattcctcacacggacggcaacttccacccttcaccgctaatgggaggatttggactgaagcacccacctcctcagatcctgatcaagaacacgccggtacctgcggatcctccaacgacgttcagccaggcgaaattggcttccttcattacgcagtacagcaccggacaggtcagcgtggaaatcgagtgggagctgcagaaggagaacagcaaacgctggaacccagagattcagtacacttcaaactactacaaatctacaaatgtggactttgctgtcaatacagagggaacttattctgagcctcgccccattggtactcgttacctcacccgtaatctgtaa

SEQ ID NO: 4936 - protein, 738 aa, Adeno-associated virus
MAADGYLPDWLEDNLSEGIREWWDLKPGAPKPKANQQKQDDGRGLVLLGYKYLGPFNGLDKGEPVNAADAAALEHDKAYDQQLKAGDNPYLRYNHADAEFQERLQEDTSFGGNLGRAVFQAKKRVLEPLGLVEEAAKTAPGKKRPVEPSPQRSPDSSTGIGKKGQQPAKKRLNFGQTGDSESVPDPQPIGEPPAGPSGLGSGTMAAGGGAPMADNNEGADGVGSSSGNWHCDSTWLGDRVITTSTRTWALPTYNNHLYKQISNGTSGGSTNDNTYFGYSTPWGYFDFNRFHCHFSPRDWQRLINNNWGFRPKRLSFKLFNIQVKEVTQNEGTKTIANNLTSTIQVFTDSEYQLPYVLGSAHQGCLPPFPADVFMIPQYGYLTLNNGSQAVGRSSFYCLEYFPSQMLRTGNNFEFSYTFEDVPFHSGYAHSQSLDRLMNPLIDQYLYYLSRTQSTGGTQGTQQLLFSQAGPANMSAQAKNWLPGPCYRQQRVSTTLSQNNNSNFAWTGATKYHLNGRDSLVNPGVAMATHKDDEERFFPSSGVLMFGKQGAGRDNVDYSSVMLTSEEEIKTTNPVATEQYGVVADNLQQTNTGPIVGNVNSQGALPGMVWQNRDVYLQGPIWAKIPHTDGNFHPSPLMGGFGLKHPPPQILIKNTPVPADPPTTFSQAKLASFITQYSTGQVSVEIEWELQKENSKRWNPEIQYTSNYYKSTNVDFAVNTEGTYSEPRPIGTRYLTRNL

SEQ ID NO: 4937 - protein, 735 aa, Adeno-associated virus
MAADGYLPDWLEDTLSEGIRQWWKLKPGPPPPKPAERHKDDSRGLVLPGYKYLGPFNGLDKGEPVNEADAAALEHDKAYDRQLDSGDNPYLKYNHADAEFQERLKEDTSFGGNLGRAVFQAKKRVLEPLGLVEPPVKTAPGKKRPVEHSPAEPDSSSGTGKAGQQPARKRLNFGQTGDADSVPDPQPLGQPPAAPSGLGSTTMATGSGAPMADNNEGADGVGNSSGNWHCDSQWLGDRVITTSTRTWALPTYNNHLYKQISSQSGASNDNHYFGYSTPWGYFDFNRFHCHFSPRDWQRLINNNWGFRPKRLNFKLFNIQVKEVTQNDGTTTIANNLTSTVQVFTDSEYQLPYVLGSAHQGCLPPFPADVFMVPQYGYLTLNNGSQAVGRSSFYCLEYFPSQMLRTGNNFQFSYTFEDVPFHSSYAHSQSLDRLMNPLIDQYLYYLNKTQSNSGTLQQSRLLFSQAGPTSMSLQAKNWLPGPCYRQQRLSKQANDNNNSNFPWTAATKYHLNGRDSLVNPGPAMASHKDDEEKFFPMHGTLIFGKQGTNANDADLDNVMITDEEEIRTTNPVATEQYGYVSNNLQNSNTGPTTGTVNHQGALPGMVWQDRDVYLQGPIWAKIPHTDGHFHPSPLMGGFGLKHPPPQIMIKNTPVPANPPTNFSSAKFASFITQYSTGQVSVEIEWELQKENSKRWNPEIQYTSNYNKSVNVDFTVDTNGVYSEPRPIGTRYLTRNL

SEQ ID NO: 4938 - protein, 735 aa, Adeno-associated virus
MAADGYLPDWLEDTLSEGIRQWWKLKPGPPPPKPAERHKDDSRGLVLPGYKYLGPFNGLDKGEPVNEADAAALEHDKAYDRQLDSGDNPYLKYNHADAEFQERLKEDTSFGGNLGRAVFQAKKRVLEPLGLVEGPVKTAPGKKRPVEHSPAEPDSSSGTGKAGQQPARKRLNFGQTGDADSVPDPQPLGQPPAAPSGLGSTTMATGSGAPMADNNEGADGVGNSSGNWHCDSQWLGDRVITTSTRTWALPTYNNHLYKQISSQSGASNDNHYFGYSTPWGYFDFNRFHCHFSPRDWQRLINNNWGFRPKRLNFKLFNIQVKEVTQNDGTTTIANNLTSTVQVFTDSEYQLPYVLGSAHQGCLPPFPADVFMVPQYGYLTLNNGSQAVGRSSFYCLEYFPSQMLRTGNNFQFSYTFEDVPFHSSYAHSQSLDRLMNPLIDQYLYYLNKTQSNSGTLQQSRLLFSQAGPTSMSLQAKNWLPGPCYRQQRLSKQANDNNNSNFPWTAATKYHLNGRDSLVNPGPAMASHKDDEEKFFPMHGTLIFGKQGTNANDADLDNVMITDEEEIRTTNPVATEQYGYVSNNLQNSNTGPTTGTVNHQGALPGMVWQDRDVYLQGPIWAKIPHTDGHFHPSPLMGGFGLKHPPPQIMIKNTPVPANPPTNFSSAKFASFITQYSTGQVSVEIEWELQKENSKRWNPEIQYTSNYNKSVNVDFTVDTNGVYSEPRPIGTRYLTRNL

SEQ ID NO: 4939 - DNA, 2208 bp, Adeno-associated virus
  source 1..2208: mol_type = genomic DNA
atggctgccgatggttatcttccagattggctcgaggacactctctctgaaggaataagacagtggtggaagctcaaacctggcccaccaccaccaaagcccgcagagcggcataaggacgacagcaggggtcttgtgcttcctgggtacaagtacctcggacccttcaacggactcgacaagggggagccggtcaacgaggcagacgccgcggccctcgagcacgacaaggcctacgaccggcagctcgacagcggagacaacccgtacctcaagtacaaccacgccgacgcggagtttcaggagcgtcttaaagaagatacgtcttttgggggcaacctcggacgagcagtcttccaggcgaaaaagagggttcttgaacctctgggcctggttgagggacctgttaagacggctccgggaaaaaagaggccggtagagcactctcctgcggagccagactcctcctcgggaaccggaaaagcgggccagcagcctgcaagaaaaagattgaattttggtcagactggagacgcagactccgtacctgacccccagcctctcggacagccaccagcagccccctctggtttgggatctactacaatggctacaggcagtggcgcaccaatggcagacaataacgagggtgccgatggagtgggtaattcctcaggaaattggcattgcgattcccaatggctgggcgacagagtcatcaccaccagcacccgaacctgggccctgcccacctacaacaaccacctctacaagcaaatctcaagccaatcaggagcctcaaacgacaaccactactttggctacagcaccccttgggggtattttgacttcaacagattccactgccacttttcaccacgtgactggcaaagactcatcaacaacaactggggattccgacccaagagactcaacttcaagctctttaacattcaagtcaaagaggtcacgcagaatgacggtacgacgacgattgccaataaccttaccagcacggttcaggtgtttactgactcggagtaccagctcccgtacgtcctcgggtcggcgcatcaaggatgcctcccgccgtttccagcggacgtcttcatggtcccacagtatggatacctcaccctgaacaacgggagtcaggcggtaggacgctcttccttttactgcctggagtactttccttctcagatgcttcgtactggaaacaactttcagttcagctacacctttgaagacgttcctttccacagcagctacgctcacagccagagtctggatcggctgatgaatcctctgatcgaccagtacctgtattatctgaacaaaacacaatcaaatagtggaactcttcagcagtctcggctactgtttagtcaagctggacccaccagcatgtctcttcaagctaaaaactggctacctggaccttgctacagacagcagcgtctgtcaaagcaggcaaacgacaacaacaacagcaactttccctggactgcggctacaaagtatcacctaaatggccgggactcgttggttaatccaggaccagctatggccagtcacaaagacgatgaagaaaagtttttccccatgcatggaaccctgatatttggtaaacaaggaacaaatgctaacgacgcggatttggacaatgtcatgattacagatgaagaagaaatccgcaccaccaatcccgtggctacggagcagtacggatatgtgtcaaataatttgcaaaactcaaatactggtccaactactggaactgtcaatcaccaaggagcgttacctggcatggtgtggcaggatcgagacgtgtacctgcagggacccatttgggccaagattcctcacaccgatggacactttcatccttctccactgatgggaggttttgggctcaaacacccgcctcctcagatcatgatcaaaaacactcccgttccagccaatcctcccacaaacttcagttctgccaagtttgcttctttcatcacacagtattccacggggcaggtcagcgtggagatcgagtgggagctgcagaaagagaacagcaaacgctggaatcccgaaattcagtacacttccaactacaacaaatctgttaatgtggactttactgtggacactaatggcgtgtattcagagcctcgccccattggcaccagatacctgactcgtaatctgtaa

SEQ ID NO: 4940 - DNA, 2211 bp, Adeno-associated virus
  source 1..2211: mol_type = genomic DNA
atggctgccgatggttatcttccagattggctcgaggacaacctctctgagggcattcgcgagtggtgggacttgaaacctggagccccgaagcccaaagccaaccagcaaaagcaggacgacggccggggtctggtgcttcctggctacaagtacctcggacccttcaacggactcgacaagggggagcccgtcaacgcggcggacgcagcggccctcgagcacgacaaggcctacgaccagcagctcaaagcgggtgacaatccgtacctgcggtataaccacgccgacgccgagtttcaggagcgtctgcaagaagatacgtcttttgggggcaacctcgggcgagcagtcttccaggccaagaagcgggttctcgaacctctcggtctggttgaggaaggcgctaagacggctcctggaaagaaacgtccggtagagcagtcgccacaagagccagactcctcctcgggcatcggcaagacaggccagcagcccgctaaaaagagactcaattttggtcagactggcgactcagagtcagtccccgatccacaacctctcggagaacctccagcaacccccgctgctgtgggacctactacaatggcttcaggcggtggcgcaccaatggcagacaataacgaaggcgccgacggagtgggtaatgcctcaggaaattggcattgcgattccacatggctgggcgacagagtcatcaccaccagcacccgcacctgggccttgcccacctacaataaccacctctacaagcaaatctccagtgcttcaacgggggccagcaacgacaaccactacttcggctacagcaccccctgggggtattttgatttcaacagattccactgccacttttcaccacgtgactggcagcgactcatcaacaacaattggggattccggcccaagagactcaacttcaaactcttcaacatccaagtcaaggaggtcacgacgaatgatggcgtcacaaccatcgctaataaccttaccagcacggttcaagtcttctcggactcggagtaccagcttccgtacgtcctcggctctgcgcaccagggctgcctccctccgttcccggcggacgtgttcatgattccgcaatacggctacctgacgctcaacaatggcagccaagccgtgggacgttcatccttttactgcctggaatatttcccttctcagatgctgagaacgggcaacaactttaccttcagctacacctttgaggaagtgcctttccacagcagctacgcgcacagccagagcctggaccggctgatgaatcctctcatcgaccaatacctgtattacctgaacagaactcaaaatcagtccggaagtgcccaaaacaaggacttgctgtttagccgtgggtctccagctggcatgtctgttcagcccaaaaactggctacctggaccctgttatcggcagcagcgcgtttctaaaacaaaaacagacaacaacaacagcaattttacctggactggtgcttcaaaatataacctcaatgggcgtgaatccatcatcaaccctggcactgctatggcctcacacaaagacgacgaagacaagttctttcccatgagcggtgtcatgatttttggaaaagagagcgccggagcttcaaacactgcattggacaatgtcatgattacagacgaagaggaaattaaagccactaaccctgtggccaccgaaagatttgggaccgtggcagtcaatttccagagcagcagcacagaccctgcgaccggagatgtgcatgctatgggagcattacctggcatggtgtggcaagatagagacgtgtacctgcagggtcccatttgggccaaaattcctcacacagatggacactttcacccgtctcctcttatgggcggctttggactcaagaacccgcctcctcagatcctcatcaaaaacacgcctgttcctgcgaatcctccggcggagttttcagctacaaagtttgcttcattcatcacccaatactccacaggacaagtgagtgtggaaattgaatgggagctgcagaaagaaaacagcaagcgctggaatcccgaagtgcagtacacatccaattatgcaaaatctgccaacgttgattttactgtggacaacaatggactttatactgagcctcgccccattggcacccgttaccttacccgtcccctgtaa

SEQ ID NO: 4941 - DNA, 2208 bp, Adeno-associated virus
  source 1..2208: mol_type = genomic DNA
atggctgccgatggttatcttccagattggctcgaggacactctctctgaaggaacaagacagtggtggaagctcaaacctggcccaccaccaccaaagcccgcagagcggcataaggacgacagcaggggtcttgtgcttcctgggtacaagtacctcggacccttcaacggactcgacaagggggagccggtcaacgaggcagacgccgcggccctcgagcacgacaaggcctacgaccggcagctcgacagcggagacaacccgtacctcaagtacaaccacgccgacgcggagtttcaggagcgtcttaaagaagatacgtcttttgggggcaacctcggacgagcagtcttccaggcgaaaaagagggttcttgaacctctgggcctggttgaggaacctgttaagacggctccgggaaaaaagaggccggtagagcactctcctgcggagccagactcctcctcgggaaccggaaaagcgggccagcagcctgcaagaaaaagattgaattttggtcagactggagacgcagactccgtacctgacccccagcctctcggacagccaccagcagccccctctggtttgggatctactacaatggctacaggcagtggcgcaccaatggcagacaataacgagggtgccgatggagtgggtaattcctcaggaaattggcattgcgattcccaatggctgggcgacagagtcatcaccaccagcacccgaacctgggccctgcccacctacaacaaccacctctacaagcaaatctcaagccaatcaggagcctcaaacgacaaccactactttggctacagcaccccttgggggtattttgacttcaacagattccactgccacttttcaccacgtgactggcaaagactcatcaacaacaactggggattccgacccaagagactcaacttcaagctctttaacattcaagtcaaagaggtcacgcagaatgacggtacgacgacgattgccaataaccttaccagcacggttcaggtgtttactgactcggagtaccagctcccgtacgtcctcgggtcggcgcatcaaggatgcctcccgccgtttccagcggacgtcttcatggtcccacagtatggatacctcaccctgaacaacgggagtcaggcggtaggacgctcttccttttactgcctggagtactttccttctcagatgcttcgtactggaaacaactttcagttcagctacacctttgaagacgttcctttccacagcagctacgctcacagccagagtctggatcggctgatgaatcctctgatcgaccagtacctgtattatctgaacaaaacacaatcaaatagtggaactcttcagcagtctcggctactgtttagtcaagctggacccaccagcatgtctcttcaagctaaaaactggctacctggaccttgctacagacagcagcgtctgtcaaagcaggcaaacgacaacaacaacagcaactttccctggactgcggctacaaagtaccacctaaatggccgggactcgttggttaatccaggaccagctatggccagtcacaaagacgatgaagaaaagtttttccccatgcatggaaccctgatatttggtaaacaaggaacaaatgctaacgacgcggatttggacaatgtcatgattacagatgaagaagaaatccgcaccaccaatcccgtggctacggagcagtacggatatgtgtcaaataatttgcaaaactcaaatactggtccaactactggaactgtcaatcaccaaggagcgttacctggcatggtgtggcaggatcgagacgtgtacctgcagggacccatttgggccaagattcctcacaccgatggacactttcatccttctccactgatgggaggttttgggctcaaacacccgcctcctcagatcatgatcaaaaacactcccgttccagccaatcctcccacaaacttcagttctgccaagtttgcttctttcatcacacagtattccacggggcaggtcagcgtggagatcgagtgggagctgcagaaagagaacagcaaacgctggaatcccgaaattcagtacacttccaactacaacaaatctgttaatgtggactttactgtggacactaatggcgtgtattcagagcctcgccccattggcaccagatacctgactcgtaatctgtaa

SEQ ID NO: 4942 - DNA, 2217 bp, Adeno-associated virus
  source 1..2217: mol_type = genomic DNA
atggctgctgacggttatcttccagattggctcgaggacaacctctctgagggcattcgcgagtggtgggacctgaaacctggagcccccaagcccaaggccaaccagcagaagcaggacgacggccggggtctggtgcttcctggctacaagtacctcggacccttcaacggactcgacaagggggagcccgtcaacgcggcggacgcagcggccctcgagcacgacaaggcctacgaccagcagctcaaagcgggtgacaatccgtacctgcggtataaccacgccgacgccgagtttcaggagcgtctgcaagaagatacgtcttttgggggcaacctcgggcgagcagtcttccaggccaagaagcgggttctcgaacctctcggtctggttgaggaagctgctaagacggctcctggaaagaagagaccggtagaaccgtcacctcagcgttcccccgactcctccacgggcatcggcaagaaaggccagcagcccgctaaaaagagactgaactttggtcagactggcgactcagagtcagtccccgaccctcaaccaatcggagaaccacctgcaggcccctctggtctgggatctggtacaatggctgcaggcggtggcgctccaatggcagacaataacgaaggcgccgacggagtgggtagttcctcaggaaattggcattgcgattccacatggctgggcgacagagtcatcaccaccagcacccgaacctgggccctgcccacctacaacaaccacctctacaagcaaatatccaatgggacatcgggagggagcaccaacgacaacacctacttcggctacagcaccccctgggggtattttgacttcaacagattccactgccacttctcaccacgtgactggcagcgactcatcaacaacaactggggattccggccaaaaagactcagcttcaagctcttcaacatccaggtcaaggaggtcacgcagaatgaaggcaccaagaccatcgccaataaccttaccagcacgattcaggtatttacggactcggaataccagctgccgtacgtcctcggctccgcgcaccagggctgcctgcctccgttcccggcggacgtcttcatgattccccagtacggctaccttacactgaacaatggaagtcaagccgtaggccgttcctccttctactgcctggaatattttccatctcaaatgctgcgaactggaaacaattttgaattcagctacaccttcgaggacgtgcctttccacagcagctacgcacacagccagagcttggaccgactgatgaatcctctcatcgaccagtacctgtactacttatccagaactcagtccacaggaggaactcaaggtacccagcaattgttattttctcaagctgggcctgcaaacatgtcggctcaggctaagaactggctacctggaccttgctaccggcagcagcgagtctctacgacactgtcgcaaaacaacaacagcaactttgcttggactggtgccaccaaatatcacctgaacggaagagactctttggtaaatcccggtgtcgccatggcaacccacaaggacgacgaggaacgcttcttcccgtcgagtggagtcctgatgtttggaaaacagggtgctggaagagacaatgtggactacagcagcgttatgctaaccagcgaagaagaaattaaaaccactaaccctgtagccacagaacaatacggtgtggtggctgacaacttgcagcaaaccaatacagggcctattgtgggaaatgtcaacagccaaggagccttacctggcatggtctggcagaaccgagacgtgtacctgcagggtcccatctgggccaagattcctcacacggacggcaactgccacccttcaccgctaatgggaggatttggactgaagcacccacctcctcagatcctgatcaagaacacgccggtacctgcggatcctccaacaacgttcagccaggcgaaattggcttccttcattacgcagtacagcaccggacaggtcagcgtggaaatcgagtgggagctgcagaaggagaacagcaaacgctggaacccagagattcagtacacttcaaactactacaaatctacaaatgtggactttgctgtcaatacagagggaacttattctgagcctcgccccattggtactcgttacctcacccgtaatctgtaa

SEQ ID NO: 4943 - protein, 735 aa, Adeno-associated virus
MAADGYLPDWLEDTLSEGTRQWWKLKPGPPPPKPAERHKDDSRGLVLPGYKYLGPFNGLDKGEPVNEADAAALEHDKAYDRQLDSGDNPYLKYNHADAEFQERLKEDTSFGGNLGRAVFQAKKRVLEPLGLVEEPVKTAPGKKRPVEHSPAEPDSSSGTGKAGQQPARKRLNFGQTGDADSVPDPQPLGQPPAAPSGLGSTTMATGSGAPMADNNEGADGVGNSSGNWHCDSQWLGDRVITTSTRTWALPTYNNHLYKQISSQSGASNDNHYFGYSTPWGYFDFNRFHCHFSPRDWQRLINNNWGFRPKRLNFKLFNIQVKEVTQNDGTTTIANNLTSTVQVFTDSEYQLPYVLGSAHQGCLPPFPADVFMVPQYGYLTLNNGSQAVGRSSFYCLEYFPSQMLRTGNNFQFSYTFEDVPFHSSYAHSQSLDRLMNPLIDQYLYYLNKTQSNSGTLQQSRLLFSQAGPTSMSLQAKNWLPGPCYRQQRLSKQANDNNNSNFPWTAATKYHLNGRDSLVNPGPAMASHKDDEEKFFPMHGTLIFGKQGTNANDADLDNVMITDEEEIRTTNPVATEQYGYVSNNLQNSNTGPTTGTVNHQGALPGMVWQDRDVYLQGPIWAKIPHTDGHFHPSPLMGGFGLKHPPPQIMIKNTPVPANPPTNFSSAKFASFITQYSTGQVSVEIEWELQKENSKRWNPEIQYTSNYNKSVNVDFTVDTNGVYSEPRPIGTRYLTRNL

SEQ ID NO: 4944 - DNA, 2208 bp, Adeno-associated virus
  source 1..2208: mol_type = genomic DNA
atggctgccgatggttatcttccagattggctcgaggacactctctctgaaggaataagacagtggtggaagctcaaacctggcccaccaccaccaaagcccgcagagcggcatcaggacaacagcaggggtcttgtgcttcctgggtacaagtacctcggaccctccaacggactcgacaaaggagagccggtcaacgaggcagacgccgcggccctcgagcacgacaaggcctacgaccggcagctcgacagcggagacaacccgtacctcaagtacaaccacgccgacgcggagtttcaggagcgtcttaaagaagatacgtcttttgggggcaacctcggacgagcagtcttccaggcgaaaaagagggttcttgaacctctgggcctggttgaggaacctgttaagacggctccgggaaaaaagaggccggtagagcactctcctgtggagccagactcctcctcgggaaccggaaaagcgggccatcagcctgcgagaaagagattgaattttggtcagactggagacgcagactccgtacctgacccccagcctctcggacagccaccagcagcccccacaagtttgggatctactacaatggctacaggcagtggcgcaccaatggcagacaataacgagggtgccgatggagtgggtaattcctcaggaaattggcattgcgattcccaatggctgggcgacagagtcatcaccaccagcacccgaacctgggccctgcccacctacaacaaccacctctacaagcaaatctccagccaatcaggagcctcgaacgacaaccactactttggctgcagcaccccctgggggtattttgacttcaacagattccactgtcacttctccccacgtgattggcaaagactcatcaacaacaactggggattccgacccaagagactcaacttcaagctctttaacattcaagtcaaagaggtcacgcagaatgacggtacgacgacgattgccaataaccttaccagcacggttcaggtgtttactgactcggagtacccgctcccgtacgtcctcggctcggcgcatcaaggatgcctcccgccgtttccagcggacgtcttcatggtcccacagtatggatacctcaccctgaacaacgggagtcaggcggtaggacgctcttccttttactgcctggagtactttccttctcagatgctgcgtaccggaaacaactttaccttcagctacacctttgaggacgttcctttccacagcagctacgctcacagccagagtttggaccggctgatgaatcctctgatcgaccagtatctatattatctgaacaggacacaatcaaatagtggaactcttcagcagtctaggctactgtttagccaagctggacccaccagcatgtctcttcaagctaaaaactggctgcctggaccttgctacagacagcagcgtctttcaaagcaggcaaacgacaacaacaacagcaactttccctggactgcggctacaaagtatcatctaaatggccgggactcgttggttaatccaggaccagctatggccagccacaaagacgatgaagaaaagtttttccccatgcatggaaccctgatatttggtaaacaaggaacaaatgctaacgacgcggatttggagcatgttatgattacagatgaagaagaaatcaggaccaccaatcctgtggctacagagcagtacggaaacgtgtcaaataatttgcaaaactcaaatactggtccaactacagaaaatgtcaatcaccagggagcgttacctggtatggtgtggcaggatcgagacgtgtacctgcagggacccatttgggccaagattcctcacaccgacggacactttcacccttctccactgatgggaggttttggactcaaacacccgcctcctcaaatcatgatcaaaaacactcccgttccagccaatcctcccacaaacttcagttctgccaagtttgcttctttcatcacacagtattccacgggccaggtcagcgtggagattgagtgggagctgcagaaggagaacagcaaacgctggaaccccgagatccagtatacttccaactacaacaaatctgttaatgtggactttactgtggacactaatggtgtgtattcagagccttgccccattggcaccagatacctgactcgtaatctgtaa

SEQ ID NO: 4945 - protein, 735 aa, Adeno-associated virus
MAADGYLPDWLEDTLSEGIRQWWKLKPGPPPPKPAERHQDNSRGLVLPGYKYLGPSNGLDKGEPVNEADAAALEHDKAYDRQLDSGDNPYLKYNHADAEFQERLKEDTSFGGNLGRAVFQAKKRVLEPLGLVEEPVKTAPGKKRPVEHSPVEPDSSSGTGKAGHQPARKRLNFGQTGDADSVPDPQPLGQPPAAPTSLGSTTMATGSGAPMADNNEGADGVGNSSGNWHCDSQWLGDRVITTSTRTWALPTYNNHLYKQISSQSGASNDNHYFGCSTPWGYFDFNRFHCHFSPRDWQRLINNNWGFRPKRLNFKLFNIQVKEVTQNDGTTTIANNLTSTVQVFTDSEYPLPYVLGSAHQGCLPPFPADVFMVPQYGYLTLNNGSQAVGRSSFYCLEYFPSQMLRTGNNFTFSYTFEDVPFHSSYAHSQSLDRLMNPLIDQYLYYLNRTQSNSGTLQQSRLLFSQAGPTSMSLQAKNWLPGPCYRQQRLSKQANDNNNSNFPWTAATKYHLNGRDSLVNPGPAMASHKDDEEKFFPMHGTLIFGKQGTNANDADLEHVMITDEEEIRTTNPVATEQYGNVSNNLQNSNTGPTTENVNHQGALPGMVWQDRDVYLQGPIWAKIPHTDGHFHPSPLMGGFGLKHPPPQIMIKNTPVPANPPTNFSSAKFASFITQYSTGQVSVEIEWELQKENSKRWNPEIQYTSNYNKSVNVDFTVDTNGVYSEPCPIGTRYLTRNL

SEQ ID NO: 4946 - DNA, 2196 bp, Adeno-associated virus
  source 1..2196: mol_type = genomic DNA
atggctgctgacggttatcttccagattggctcgaggacaacctctctgagggcattcgcgagtggtgggcgctgaaacctggagccccgcaacccaaagccaaccagcaaaagcaggacgacggccggggtctggtgcttcctggctacaagtacctcggacccttcaacggactcgacaagggggagcccgtcaacgaggcggacgccgcggccctcgagcacgacaaggcctacgaccagcagctcaaagcgggtgacaatccgtacctgcggtataatcacgccgacgccgagtttcaagagcgtctgcaagaagatacgtcctttgggggcaacctcgggcgagcagtcttccaggccaaaaagagggtactcgagcctctgggtctggttgaggaaggcgctaagacggctcctggaaagaagcggccagtagaaccggactccagctcgggcatcggcaagtcaggccagcagcccgcgaaaaagagactgaattttgggcagactggcgactcagagtcagtgcctgacccccaacctctctcagaaccacccgcaggtccctctggtctgggatctggtacaatggctgctggcggtggcgctccaatggcagacaataacgaaggcgccgacggagtgggtaatgtctcaggaaattggcattgcgattccacatggctgggcgaccgagtcatcaccaccagcactcggacctgggccctccccacctacaacaaccacctctacaagcaaatctccaacgggacctcgggaggcagcagcaacgacaacacctactttggctacagcaccccctgggggtattttgactttaacagattccactgccacttttcaccacgtgactggcagcgactcatcaacaacaactgggggttccggcccaagaagctcaacttcaagctcttcaacatccaggtcaaggaggtcacccagaatgaaggcaccaagaccatcgccaataacctcaccagcacggtgcaggtctttacggactcggagtaccagctcccgtacgtgctcggctctgcccaccagggctgcctgcctccgttcccggcggacgtgttcatgattccgcagtacgggtacctgacgctgaacaacgggagccaggccgtggggcgatcctccttctactgcctggagtactttccctcgcagatgctgagaacgggcaacaactttaccttcagctacaccttcgaggacgtgcccttccacagcagctacgcgcacagccagagcctggaccggctgatgaacccgctgattgaccagtacctgtactacctgtctcggactcagaccaacgggaccaatgccacgcagactctgttgtttgctcaggccgggcctcagaacatgtcggctcaggccaagaactggctgcctggtccttgctatcggcagcagcgcgtctctacgacagtgtcgcaaaacaacaacagcaactttacctggaccggggcgaccaagtaccacctgaacggccgagactccctggtgagccccggtgtcgccatggcaacgcacaaggacgacgaggagcgcttcttcccgagcagcggggtcctgatgtttggcaagcagggcgctggaaaggacaatgtcgagtacaccaacgtgatgctcaccagcgaggaggagatcaagaccaccaaccctgtggccacggagcagtacggcgtggtggctgacaatctgcagcagaccaactcagctcccattgtgggggcagtcaacagccagggggccttacccggtatggtctggcagaaccgggacgtgtacctgcagggtcccatctgggccaagatcccgcatacggacggcaactttcacccgtctcctctcatgggcggctttggactgaaacacccgcctccccagatcctgatcaaaaacacgccggtacctgcggatcccccggtgaactttacggacgctaagctggcgagtttcatcacgcagtacagcaccgggcaggtcagcgtggagattgagtgggagctgcagaaggagaacagcaagcgctggaatcccgagattcagtacacttccaattattataaatcagctaatgtggactttgccgtcaatgcagatggtgtatatagtgaaccccgccccattggcactcgttacctcacccgtaatctgtaa

SEQ ID NO: 4947 - protein, 731 aa, Adeno-associated virus
MAADGYLPDWLEDNLSEGIREWWALKPGAPQPKANQQKQDDGRGLVLPGYKYLGPFNGLDKGEPVNEADAAALEHDKAYDQQLKAGDNPYLRYNHADAEFQERLQEDTSFGGNLGRAVFQAKKRVLEPLGLVEEGAKTAPGKKRPVEPDSSSGIGKSGQQPAKKRLNFGQTGDSESVPDPQPLSEPPAGPSGLGSGTMAAGGGAPMADNNEGADGVGNVSGNWHCDSTWLGDRVITTSTRTWALPTYNNHLYKQISNGTSGGSSNDNTYFGYSTPWGYFDFNRFHCHFSPRDWQRLINNNWGFRPKKLNFKLFNIQVKEVTQNEGTKTIANNLTSTVQVFTDSEYQLPYVLGSAHQGCLPPFPADVFMIPQYGYLTLNNGSQAVGRSSFYCLEYFPSQMLRTGNNFTFSYTFEDVPFHSSYAHSQSLDRLMNPLIDQYLYYLSRTQTNGTNATQTLLFAQAGPQNMSAQAKNWLPGPCYRQQRVSTTVSQNNNSNFTWTGATKYHLNGRDSLVSPGVAMATHKDDEERFFPSSGVLMFGKQGAGKDNVEYTNVMLTSEEEIKTTNPVATEQYGVVADNLQQTNSAPIVGAVNSQGALPGMVWQNRDVYLQGPIWAKIPHTDGNFHPSPLMGGFGLKHPPPQILIKNTPVPADPPVNFTDAKLASFITQYSTGQVSVEIEWELQKENSKRWNPEIQYTSNYYKSANVDFAVNADGVYSEPRPIGTRYLTRNL

SEQ ID NO: 4948 - DNA, 2196 bp, Adeno-associated virus
  source 1..2196: mol_type = genomic DNA
atggctgctgacggttatcttccagattggctcgaggacaacctctctgagggcattcgcgagtggtgggcgctgaaacctggagccccgcaacccaaagccaaccagcaaaagcaggacgacggccggggtctggtgcttcctggctacaagtacctcggacccttcaacggactcgacaagggggagcccgtcaacgaggcggacgccgcggccctcgagcacgacaaggcctacgaccagcagctcaaagcgggtgacaatccgtacctgcggtataatcacgccgacgccgagtttcaagagcgtctgcaagaagatacgtcctttgggggcaacctcgggcgagcagtcttccaggccaaaaagagggtactcgagcctctgggtctggttgaggaaggcgctaagacggctcctggaaagaagcggccagtagaaccggactccagctcgggcatcggcaagtcaggccggcagcccgcgaaaaagagactgaattttgggcagactggcgactcagagtcagtgcctgacccccaacctctctcagaaccacccgcaggtccctctggtctgggatctggtacaatggctgcaggcggtggcgctccaatggcagacaataacgaaggcgccgacggagtgggtaatgcctcaggaaattggcattgcgattccacatggctgggcgaccgagtcatcaccaccagcactcggacctgggccctccccacctacaacaaccacctctacaagcaaatctccaacgggacctcgggaggcagcagcaacgacaacacctactttggctacagcaccccctgggggtattttgactttaacagattccactgccacttttcaccacgtgactggcagcgactcatcaacaacaactggggattccggcccaagaggctcaacttcaagctcttcaacatccaggtcaaggaggtcacccagaatgaaggcaccaagaccatcgccaataacctcaccagcacggtgcaggtctttacggactcgaagtaccagctcccgtacgtgctcggctctgcccaccagggctgcctgcctccgttcccggcggacgtgttcatgattccgcagtacgggtacctgacgctgaacaacgggagccaggccgtggggcgatcctccttctactgcctggagtactttccctcgcagatgctgagaacgggcaacaactttaccttcagctacaccttcgaggacgtgcccttccacagcagctacgcgcacagccagagcctggaccggctgatgaacccgctgattgaccagtacctgtactacctgtctcggactcagaccaacgggaccaatgccacgcagactctgttgtttgctcaggccgggcctcagaacatgtcggctcaggccaagaactggctgcctggtccttgctatcggcagcagcgcgtctctacgacagtgtcgcaaaacaacaacagcaactttacctggaccggggcgaccaagtaccacctgaacggccgagactccctggtgaaccccggtgtcgccatggcaacgcacaaggacgacgaggagcgcttcttcccgagcagcggggtcctgatgtttggcaagcagggcgctggaaaggacaatgtcgagtacaccaacgtgatgctcaccagcgaggaggagatcaagaccaccaaccctgtggccacggagcagtacggtgtggtggctgacaatctgcagcagaccaactcggctcccattgtgggggcagtcaacagccagggggccttacccggtatggtctggcagaaccgggacgtgtacctgcagggtcccatctgggccaagatcccgcatacggacggcaactttcacccgtctcctctcatgggcggctttggactgaaacacccgcctccccagatcctgatcaaaaacacgccggtacctgcggatcccccggtgaactttacggacgctaagctggcgagtttcatcacgcagtacagcaccgggcaggtcagcgtggagattgagtgggagctgcagaaggagaacagcaagcgctggaatcccgagattcagtacacttccaattattataaatcagctaatgtggactttgccgtcaatgcagatggtgtatatagtgaaccccgccccattggcactcgttacctcacccgtaatctgtaa

SEQ ID NO: 4949 - protein, 731 aa, Adeno-associated virus
MAADGYLPDWLEDNLSEGIREWWALKPGAPQPKANQQKQDDGRGLVLPGYKYLGPFNGLDKGEPVNEADAAALEHDKAYDQQLKAGDNPYLRYNHADAEFQERLQEDTSFGGNLGRAVFQAKKRVLEPLGLVEEGAKTAPGKKRPVEPDSSSGIGKSGRQPAKKRLNFGQTGDSESVPDPQPLSEPPAGPSGLGSGTMAAGGGAPMADNNEGADGVGNASGNWHCDSTWLGDRVITTSTRTWALPTYNNHLYKQISNGTSGGSSNDNTYFGYSTPWGYFDFNRFHCHFSPRDWQRLINNNWGFRPKRLNFKLFNIQVKEVTQNEGTKTIANNLTSTVQVFTDSKYQLPYVLGSAHQGCLPPFPADVFMIPQYGYLTLNNGSQAVGRSSFYCLEYFPSQMLRTGNNFTFSYTFEDVPFHSSYAHSQSLDRLMNPLIDQYLYYLSRTQTNGTNATQTLLFAQAGPQNMSAQAKNWLPGPCYRQQRVSTTVSQNNNSNFTWTGATKYHLNGRDSLVNPGVAMATHKDDEERFFPSSGVLMFGKQGAGKDNVEYTNVMLTSEEEIKTTNPVATEQYGVVADNLQQTNSAPIVGAVNSQGALPGMVWQNRDVYLQGPIWAKIPHTDGNFHPSPLMGGFGLKHPPPQILIKNTPVPADPPVNFTDAKLASFITQYSTGQVSVEIEWELQKENSKRWNPEIQYTSNYYKSANVDFAVNADGVYSEPRPIGTRYLTRNL

SEQ ID NO: 4950 - DNA, 2196 bp, Adeno-associated virus
  source 1..2196: mol_type = genomic DNA
atggctgctgacggttatcttccagattggctcgaggacaacctctctgagggcattcgcgagtggtgggcgctgaaacctggagccccgcaacccaaagccaaccagcaaaagcaggacgacggccggggtctggtgcttcctggctacaagtacctcggacccttcaacggactcgacaagggggagcccgtcaacgaggcggacgccgcggccctcgagcacgacaaggcctacgaccagcagctcaaagcgggtgacaatccgtacctgcggtataatcacgccgacgccgagtttcaagagcgtctgcaagaagatacgtcctttgggggcaacctcgggcgagcagtcttccaggccaaaaagagggtactcgagcctctgggtctggttgaggaaggcgctaagacggctcctggaaagaagcggccagtagaaccggactccagctcgggcatcggcaagtcaggccagcagcccgcgaaaaagagactgaattttgggccgactggcgactcagagtcagtgcctgacccccaacctctctcagaaccacctgcaggtccctctggtctgggatctggtacaatggctgcaggcggtggcgctccaatggcagacaataacgaaggcgccgacggagtgggtaatgtctcaggaaattggcattgcgattccacatggctgggcgaccgagtcatcaccaccagcactcggacctgggccctccccacctacaacaaccacctctacaagcaaatctccaacgggacctcgggaggcagcagcaacgacaacacctactttggctacagcaccccctgggggtattttgactttaacagattccactgccacttttcaccacgcgactggcagcgactcatcaacaacaactggggattccggcccaagaagctcaacttcaagctcttcaacatccaggtcaaggaggtcacccagaatgaaggcaccaagaccaccgccaataacctcaccagcacggtgcaggtctttacggactcggagtaccagctcccgtacgtgctcggctctgcccaccagggctgcctgcctccgttcccggcggacgtgttcatgattccgcagtacgggtacctgacgctgaacaacgggagccaggccgtggggcgatcctccttctactgcctggagtactttccctcgcagatgctgagaacgggcaacaactttaccttcagctacaccttcgaggacgtgcccttccacagcagctacgcgcacagccagagcctggaccggctgatgaacccgctgattgaccagtacctgtactacctgtctcggactcagaccaacgggaccaatgccacgcagactctgttgtttgctcaggccgggcctcagaacatgtcggctcaggccaagaactggctgcctggtccttgctatcggcagcagcgcgtctctacggcagtgtcgcaaaacaacaacagcaactttacctggaccggggcgaccaagtaccacctgaacggccgagactccctggtgaaccccggtgtcgccatggcaacgcacaaggacgacgaggagcgcttcttcccgagcagcggggtcctgatgtttggcaagcagggcgctggaaaggacaatgtcgagtacaccaacgtgatgctcaccagcgaggaggagatcaagaccaccaaccctgtggccacggagcagtacggtgtggtggctgacaatctgcagcagaccaactcggctcccattgtgggggcagtcaacagccagggggccttacccggtatggtctggcagaaccgggacgtgtacctgcagggtcccatctgggccaagatcccgcatacggacggcaactttcacccgtctcctctcatgggcggctttggactgaaacacccgcctccccagatcctgatcaaaaacacgccggtacctgcggatcccccggtgaactttacggacgctaagctggcgagtttcatcacgcagtacagcaccgggcaggtcagcgtggagattgagtgggagctgcagaaggagaacagcaagcgctggaatcccgagattcagtacacttccaattattataaatcagctaatgtggactttgccgtcaatgcagatggtgtatatagcgaaccccgccccattggcactcgttacctcacccgtaatctgtaa

SEQ ID NO: 4951 - protein, 731 aa, Adeno-associated virus
MAADGYLPDWLEDNLSEGIREWWALKPGAPQPKANQQKQDDGRGLVLPGYKYLGPFNGLDKGEPVNEADAAALEHDKAYDQQLKAGDNPYLRYNHADAEFQERLQEDTSFGGNLGRAVFQAKKRVLEPLGLVEEGAKTAPGKKRPVEPDSSSGIGKSGQQPAKKRLNFGPTGDSESVPDPQPLSEPPAGPSGLGSGTMAAGGGAPMADNNEGADGVGNVSGNWHCDSTWLGDRVITTSTRTWALPTYNNHLYKQISNGTSGGSSNDNTYFGYSTPWGYFDFNRFHCHFSPRDWQRLINNNWGFRPKKLNFKLFNIQVKEVTQNEGTKTTANNLTSTVQVFTDSEYQLPYVLGSAHQGCLPPFPADVFMIPQYGYLTLNNGSQAVGRSSFYCLEYFPSQMLRTGNNFTFSYTFEDVPFHSSYAHSQSLDRLMNPLIDQYLYYLSRTQTNGTNATQTLLFAQAGPQNMSAQAKNWLPGPCYRQQRVSTAVSQNNNSNFTWTGATKYHLNGRDSLVNPGVAMATHKDDEERFFPSSGVLMFGKQGAGKDNVEYTNVMLTSEEEIKTTNPVATEQYGVVADNLQQTNSAPIVGAVNSQGALPGMVWQNRDVYLQGPIWAKIPHTDGNFHPSPLMGGFGLKHPPPQILIKNTPVPADPPVNFTDAKLASFITQYSTGQVSVEIEWELQKENSKRWNPEIQYTSNYYKSANVDFAVNADGVYSEPRPIGTRYLTRNL

SEQ ID NO: 4952 - DNA, 4404 bp, Adeno-associated virus
  source 1..4404: mol_type = genomic DNA
atggctgccgatggttatcttccagattggctcgagggcaacctctctgagggcattcgcgagtggtgggacttgaaacctggagccccgaaacccaaagccaaccagcaaaagcaggacgacggccggggtctggtgcttcctggctacaggtacctcggacccttcaacggactcgacaagggagagccggtcaacgaggcagacgccgcggccctcgagcacgacaaggcctacgacaagcagctcgagcagggggacaacccgtacctcaagtacaaccacgccgacgccgagtttcaggagcgtcttcaagaagatacgtcttttgggggcaacctcgggcgagcagtcttccaggccaagaagcgggttctcgaacctctcggtctggttgaggaaggcgctaagacggctcctggaaagaagagacccatagaatcccccgactcctccacgggcatcggcaagaacggccagccgcccgctaaaaagaagctcaactttgggcagactggcgactcagagtcagtgcccgacccccaacctctcggagaacctcccgccgcgccctcaggtctgggatctggtacaatggctgcaggcggtggcgcaccaatggcagacaataacgaaggcgccgacggagtgggtaatgcctccggaaattggcattgcgattccacatggctgggcgacagagtcatcaccaccagcacccgcacctgggccctgcccacctacaacaaccacctctacaagcagatatcaagtcagagcggggctaccaacgacaaccacttcttcggctacagcaccccctggggctattttgacttcaacagattccactgccacttctcaccacgtgactggcagcgactcatcaacaacaactggggattccggcccagaaagctgcggttcaagttgttcaacatccaggtcaaggaggtcacgacgaacgacggcgttacgaccatcgctaataaccttaccagcacgattcaggtcttctcggactcggagtaccaactgccgtacgtcctcggctctgcgcaccagggctgcctccctccgttccctgcggacgtgttcatgattcctcagtacggatatctgactctaaacaacggcagtcagtctgtgggacgttcctccttctactgcctggagtactttccttctcagatgctgagaacgggcgataactttgaattcagctacacctttgaggaagtgcctttccacagcagctatgcgcacagccagagcctggaccggctgatgaatcccctcatcgaccagtacctgtactacctggcccggacccagagcactacggggtccacaagggagctgcagttccatcaggctgggcccaacaccatggccgagcaatcaaagaactggctgcccggaccctgttatcggcagcagagactgtcaaaaaacatagacagcaacaacaacagtaactttgcctggaccggggccactaaataccatctgaatggtagaaattcattaaccaacccgggcgtagccatggccaccaacaaggacgacgaggaccagttctttcccatcaacggagtgctggtttttggcaaaacgggggctgccaacaagacaacgctggaaaacgtgctaatgaccagcgaggaggagatcaaaaccaccaatcccgtggctacagaagaatacggtgtggtctccagcaacctgcaatcgtctacggccggaccccagacacagactgtcaacagccagggggctctgcccggcatggtctggcagaaccgggacgtgtacctgcagggtcccatctgggccaaaattcctcacacggacggcaactttcacccgtctcccctgatgggcggatttggactcaaacacccgcctcctcaaattctcatcaaaaacaccccggtacctgctaatcctccagaggtgtttactcctgccaagtttgcctcatttatcacgcagtacagcaccggccaggtcagcgtggagatcgagtgggaactgcagaaagaaaacagcaaacgctggaatccagagattcagtacacctcaaattatgccaagtctaataatgtggaatttgctgtcaacaacgaaggggtttatactgagcctcgccccattggcacccgttacctcacccgtaacctgtaaatggctgccgatggttatcttccagattggctcgaggacaacctctctgagggcattcgcgagtggtgggacttgaaacctggagccccgaaacccaaagccaaccagcaaaagcaggacgacggccggggtctggtgcttcctggctacaagtacctcggacccttcaacggactcgacaagggggagcccgtcaacgcggcggacgcagcggccctcgagcacgacaaggcctacgaccagcagctcaaagcgggtgacaatccgtacctgcggtataaccacgccgacgccgagtttcaggagcgtctgcaagaagatacgtcttttgggggcaacctcgggcgagcagtcttccaggccaagaagcgggttctcgaacctctcggtctggttgaggaaggcgctaagacggctcctggaaagaagagaccggtagagccatcaccccagcgttctccagactcctctacgggcatcggcaagaaaggccagcagcccgcgaaaaagagactcaactttgggcagactggcgactcagagtcagtgcccgaccctcaaccaatcggagaaccccccgcaggcccctctggtctgggatctggtacaatggctgcaggcggtggcgctccaatggcagacaataacgaaggcgccgacggagtgggtagttcctcaggaaattggcattgcgattccacatggctgggcgacagagtcatcaccaccagcacccgaacctgggccctccccacctacaacaaccacctctacaagcaaatctccaacgggacttcgggaggaagcaccaacgacaacacctacttcggctacagcaccccctgggggtattttgactttaacagattccactgccacttctcaccacgtgactggcagcgactcatcaacaacaactggggattccggcccaagagactcaacttcaagctcttcaacatccaggtcaaggaggtcacgcagaatgaaggcaccaagaccatcgccaataaccttaccagcacgattcaggtctttacggactcggaataccagctcccgtacgtcctcggctctgcgcaccagggctgcctgcctccgttcccggcggacgtcttcatgattcctcagtacgggtacctgactctgaacaatggcagtcaggccgtgggccgttcctccttctactgcctggagtactttccttctcaaatgctgagaacgggcaacaactttgagttcagctaccagtttgaggacgtgccttttcacagcagctacgcgcacagccaaagcctggaccggctgatgaaccccctcatcgaccagtacctgtactacctgtctcggactcagtccacgggaggtaccgcaggaactcagcagttgctattttctcaggccgggcctaataacatgtcggctcaggccaaaaactggctacccgggccctgctaccggcagcaacgcgtctccacgacactgtcgcaaaataacaacagcaactttgcctggaccggtgccaccaagtatcatctgaatggcagagactctctggtaaatcccggtgtcgctatggcaacccacaaggacgacgaagagcgattttttccgtccagcggagtcttaatgtttgggaaacagggagctggaaaagacaacgtggactatagcagcgttatgctaaccagtgaggaagaaattaaaaccaccaacccagtggccacagaacagtacggcgtggtggccgataacctgcaacagcaaaacgccgctcctattgtaggggccgtcaacagtcaaggagccttacctggcatggtctggcagaaccgggacgtgtacctgcagggtcctatctgggccaagattcctcacacggacggaaactttcatccctcgccgctgatgggaggctttggactgaaacacccgcctcctcagatcctgattaagaatacacctgttcccgcggatcctccaactaccttcagtcaagctaagctggcgtcgttcatcacgcagtacagcaccggacaggtcagcgtggaaattgaatgggagctgcagaaagaaaacagcaaacgctggaacccagagattcaatacacttccaactactacaaatctacaaatgtggactttgctgttaacacagatggcacttattctgagcctcgccccatcggcacccgttacctcacccgtaatctgtaa

SEQ ID NO: 4953 - protein, 738 aa, Adeno-associated virus; identical to SEQ ID NO: 4756

SEQ ID NO: 4954 - protein, 738 aa, Adeno-associated virus; identical to SEQ ID NO: 4756

SEQ ID NO: 4955 - DNA, 2501 bp, Adeno-associated virus
  source 1..2501: mol_type = genomic DNA
gaattcgcccttggctgcgtcaactggaccaatgagaactttcccttcaacgattgcgtcgacaagatggtgatctggtgggaggagggcaagatgacggccaaggtcgtggagtccgccaaggccattcatcatctgctggggcgggctcccgagattgcttgctcggcctgcgatctggtcaacgtggacctggatgactgtgtttctgagcaataaatgacttaaaccaggtatggctgccgatggttatcttccagattggctcgaggacaacctctctgagggcattcgcgagtggtgggacttgagacctggagccccgaaacccaaagccaaccagcaaaagcaggacgacggccggggtctggtgcttcctggctacaagtacctcggacccttcaacggactcgacaagggagagccggtcaacgaggcagacgccgcggccctcgagcacgacaaggcctacgacaagcagctcgagcagggggacaacccgtacctcaagtacaaccacgccgacgccgagtttcaggagcgtcttcaagaagatacgtcttttgggggcaacctcgggcgagcagtcttccaggccaagaagcgggttctcgaacctctcggtctggttgaggaaggcgctaagacggctcctggaaagaagagacccatagaatcccccgactcctccacgggcatcggcaagaaaggccagcagcccgctaaaaagagactcaactttgggcagactggcgactcagagtcagtgcccgaccctcaaccaatcggagaaccccccgcaggcccctctggtctgggatctggcacaatggctgcaggcggtggcgctccaatggcagacaataacgaaggcgccgacggagtgggtagttcctcaggaaattggcattgcgattccacatggctgggcgacagagtcatcaccaccagcacccgaacctgggccctccccacctacaacaaccacctctacaagcaaatctccaacgggacatcgggaggaagcaccaacgacaacacctacttcggctacagcaccccctgggggtattttgactttaacagattccactgccacttctcaccacgtgactggcagcgactcatcaacaacaactggggattccggcccaagagactcaacttcaagctcttcaacatccaggtcaaggaggtcacgcagaatgaaggcaccaagaccatcgccaataaccttaccagcacgattcaggtctttacggactcggaataccagctcccgtacgtcctcggctctgcgcaccagggctgcctgcctccgttcccggcggacgtcttcatgattcctcagtacgggtacctgactctgaacaacggcagtcaggccgtgggccgttcctccttctactgcctggagtactttccttctcaaatgctgagaacgggcaacaactttgagttcagctaccagtttgaggacgtgccttttcacagcagctatgcgcacagccaaagcctggaccggctgatgaaccccctcatcgaccagtacctgtactacctgtctcggactcagtccacgggaggtaccgcaggaactcagcagttgctattttctcaggccgggcctaataacatgtcggctcaggccaaaaactggctacccgggccctgctaccggcagcaacgcgtctccacgacagtgtcgcaaaataacaacagcaactttgcttggaccggtgccaccaagtatcatctgaatggcagagactctctggtaaatcccggtgtcgctatggcaacgcacaagggcgacgaagagcgattttttccatccagcggagtcttgatgtttgggaaacagggagctggaaaagacaacgtagactatagcagcgttatgctaaccagtgaggaagaaatcaaaaccaccaacccagtggccacagaacagtacggcgtggtggccgataacctgcaacagcaaaacgccgctcctattgtaggggccgtcaacagtcaaggagccttacctggcatggtctggcagaaccgggacgtgtacctgcagggtcctatctgggccaagattcctcacacggacggcaactttcatccttcgccgctgatgggaggctttggactgaaacacccgcctcctcagatcctgattaagaatacacctgttcccgcggatcctccaactaccttcagtcaagccaagctggcgtcgttcatcacgcagtacagcaccggacaggtcagcgtggaaattgaatgggagctgcagaaagagaacagcaagcgctggaacccagagattcagtatacttccaactactacaaatctacaaatgtggactttgctgtcaatactgagggtacttattcagagcctcgccccattggcacccgttacctcacccgtaacctgtaattgcctgttaatcaataaaccggttgattcgtttcagttgaactttggtctcaagggcgaattc

SEQ ID NO: 4956 - DNA, 2187 bp, Adeno-associated virus
  source 1..2187: mol_type = genomic DNA
atggctgccgatggttatcttccagattggctcgaggacaacctctctgagggcattcgcgagtggtgggacttgaaacctggagccccgaaacccaaagccaaccagcaaaagcaggacgacggccggggtctggtgcttcctggctacaagtacctcggacccttcaacggactcgacaagggagagccggtcaacgaggcagacgccgcggccctcgagcacgacaaggcctacgacaagcagctcgagcagggggacaacccgtacctcaagtacaaccacgccgacgccgagtttcaggagcgtcttcaagaagatacgtcttttgggggcaacctcgggcgagcagtcttccaggccaagaagcgggttctcgaacctctcggtctggttgaggaaggcgctaagacggctcctggaaagaagagacccatagaatcccccgactcctccacgggcatcggcaagaaaggccagcagcccgctaaaaagaagctcaactttgggcagactggcgactcagagtcagtgcccgacccccaacctctcggagaacctcccgccgcgccctcaggtctgggatctggtacaatggctgcaggcggtggcgcaccaatggcagacaataacgaaggcgccgacggagtgggtaatgcctccggaaattggcattgcgattccacatggctgggcgacagagtcatcaccaccagcacccgcacctgggccctgcccacctacaacaaccacctctacaagcagatatcaagtcagagcggggctaccaacgacaaccacttcttcggctacagcaccccctggggctattttgacttcaacagattccactgccacttctcaccacgtgactggcagcgactcatcaacaacaactggggattccggcccagaaagctgcggttcaagttgttcaacatccaggtcaaggaggtcacgacgaacgacggcgttacgaccatcgctaataaccttaccagcacgattcaggtcttctcggactcggagtaccaactgccgtacgtcctcggctctgcgcaccagggctgcctccctccgttccctgcggacgtgttcatgattcctcagtacggatatctgactctaaacaacggcagtcagtctgtgggacgttcctccttctactgcctggagtactttccttctcagatgctgagaacgggcaataactttgaattcagctacacctttgaggaagtgcctttccacagcagctatgcgcacagccagagcctggaccggctgatgaatcccctcatcgaccagtacctgtactacctggcccggacccagagcactacggggtccacaagggagctgcagttccatcaggctgggcccaacaccatggccgagcaatcaaagaactggctgcccggaccctgttatcggcagcagagactgtcaaaaaacatagacagcaacaacaacagtaactttgcctggaccggggccactaaataccatctgaatggtagaaattcattaaccaacccgggcgtagccatggccaccaacaaggacgacgaggaccagttctttcccatcaacggagtgctggtttttggcgaaacgggggctgccaacaagacaacgctggaaaacgtgctaatgaccagcgaggaggagatcaaaaccaccaatcccgtggctacagaagaatacggtgtggtctccagcaacctgcaatcgtctacggccggaccccagacacagactgtcaacagccagggggctctgcccggcatggtctggcagaaccgggacgtgtacctgcagggtcccatctgggccaaaattcctcacacggacggcaactttcacccgtctcccctgatgggcggatttggactcaaacacccgcctcctcaaattctcatcaaaaacaccccggtacctgctaatcctccagaggtgtttactcctgccaagtttgcctcatttatcacgcagtacagcaccggccaggtcagcgtggagatcgagtgggaactgcagaaagaaaacagcaaacgctggaatccagagattcagtacacctcaaattatgccaagtctaataatgtggaatttgctgtcaacaacgaaggggtttatactgagcctcgccccattggcacccgttacctcacccgtaacctgtaa

SEQ ID NO: 4957 - protein, 728 aa, Adeno-associated virus; identical to SEQ ID NO: 4728

SEQ ID NO: 4958 - protein, 728 aa, Adeno-associated virus; identical to SEQ ID NO: 4792

SEQ ID NO: 4959 - protein, 728 aa, Adeno-associated virus; identical to SEQ ID NO: 4792

SEQ ID NO: 4960 - DNA, 3113 bp, Adeno-associated virus
  source 1..3113: mol_type = genomic DNA
gaattcgccctttctacggctgcgtcaactggaccaatgagaactttcccttcaacgattgcgtcgacaagatggtgatctggtgggaggagggcaagatgacggccaaggtcgtggagtccgccaaggccattctcggcggcagcaaggtgcgcgtggaccaaaagtgcaagtcgtccgcccagatcgatcccacccccgtgatcgtcacttccaacaccaacatgtgcgccgtgattgacgggaacagcaccaccttcgagcaccagcagccgttacaagaccggatgttcaaatttgaactcacccgccgtctggagcatgactttggcaaggtgacaaagcaggaagtcaaagagttcttccgctgggcgcaggatcacgtgaccgaggtggcgcatgagttctacgtcagaaagggtggagccaacaagagacccgcccccgatgacgcggataaaagcgagcccaagcgggcctgcccctcagtcgcggatccatcgacgtcagacgcggaaggagctccggtggactttgccgacaggtaccaaaacaaatgttctcgtcacgcgggcatgcttcagatgctgcttccctgcaagacatgcgagagaatgaatcagaatttcagcatttgcttcacgcacgggaccagagactgttcagaatgtttccccggcgtgtcagaatctcaaccggtcgtcagaaagaggacgtatcggaaactctgtgccattcatcatctgctggggcgggctcccgagattgcttgctcggcctgcgatctggtcaacgtggacctggatgactgtgtttctgagcaataaatgacttaaaccaggtatggctgccgatggtcatcttccagattggctcgaggacaacctctctgagggcattcgcgagtggtgggacttgaaacctggagccccgaaacccaaagccaaccagcaaaagcaggacgacggccggggtctggtgcttcctggctacaagtacctcggacccttcaacggactcgacaagggggagcccgtcaacgcggcggacgcagcggccctcgagcacgacaaggcctacgaccagcagctcaaagcgggtgacaatccgtacctgcggtataaccacgccgacgccgagtttcaggagcgtcttcaagaagatacgtcttttgggggcaacctcgggcgagcagtcttccaggccaagaagcgggttctcgaacctctcggtctggttgaggaaggcgctaagacggctcctggaaagaagagacccatagaatcccccgactcctccacgggcatcggcaagaaaggccagcagcccgctaaaaagaagctcaactttgggcagactggcgactcagagtcagtgcccgaccctcaaccaatcggagaaccccccgcaggcccctctggtctgggatctggtacaatggctgcaggcggtggcgctccaatggcagacaataacgaaggcgccgacggagtgggtagttcctcaggaaattggcattgcgattccacatagctgggcgacagagtcatcaccaccagcacccgaacctgggccctccccacctacaacaaccacctctacaagcaaatctccaacgggacatcgggaggaagcaccaacgacaacacctacttcggctacagcaccccctgggggtattttgactttaacagattccactgccacttctcaccacgtgactggcagcgactcatcaacaacagctggggattccggcccaagagactcaacttcaagctcttcaacatccaggtcaaggaggtcacgcagaatgaaggcaccaagaccatcgccaataaccttaccagcacgattcaggtctttacggactcggaataccagctcccgtacgtcctcggctctgcgcaccagggctgcctgcctccgttcccggcggacgtcttcatgattcctcagtacgggtacctgactctgaacaacggcagtcaggccgtgggccgttcctccttctactgcctggagtactttccttctcaaatgctgagaacgggcaacaactttgagttcagctaccagtttgaggacgtgccttttcacagcagctacgcgcacagccaaagcctggaccggctgatgaaccccctcatcgaccagtacctgtactacctgtctcggactcagtccacgggaggtaccgcaggaactcagcagttgctattttctcaggccgggcctaataacatgtcggctcaggccaaaaactggctacccgggccctgctaccggcagcaacgcgtctccacgacactgtcgcaaaataacaacagcaactttgcttggaccggtgccaccaagtatcatctgaatggcagagactctctggtaaatcccggtgtcgctatggcaacgcacaaggacgacgaagagcgattttttccatccagcggagtcttgatgtttgggaaacagggagctggaaaagacaacgtggactatagcagcgttatgctaaccagtgaggaagaaatcaaaaccaccaacccagtggccacagaacagtacggcgtggtggccgataacctgcaacagcaaaacgccgctcctattgtaggggccgtcaacagtcaaggagccttacctggcatggtctggcagaaccgggacgtgtacctgcagggtcctatctgggccaagattcctcacacggacggcaactttcatccttcgccgctgatgggaggctttggactgaaacacccgcctcctcagatcctgattaagaatacacctgttcccgcggatcctccaactaccttcagtcaagccaagctggcgtcgttcatcacgcagtacagcaccggacaggtcagcgtggaaattgaatgggagctgcagaaagagaacagcaagcgctggaacccagagattcagtatacttccaactactacaaatctacaaatgtggactttgctgtcaatactgagggtacttattcagagcctcgccccattggcacccgttacctcacccgtaacctgtaattgcctgttaatcaataaaccggttaattcgtttcagttgaactttggtctctgcgaagggcgaattc

SEQ ID NO: 4961 - DNA, 3106 bp, Adeno-associated virus
  source 1..3106: mol_type = genomic DNA
gaattcgcccttctacggctgcgtcaactggaccaatgagaactttcccttcaacgattgcgtcgacaagatggtgatctggtgggaggagggcaagatgacggccaaggtcgtggagtccgccaaggccattctcggcggcagcaaggtgcgcgtggaccaaaagtgcaagtcgtccgcccagatcgaccccacccccgtgatcgtcacctccaacaccaacatgtgcgccgtgattgacgggaacagcaccaccttcgagcaccagcagccgttgcaggaccggatgttcaaatttgaactcacccgccgtctggagcatgactttggcaaggcgacaaagcaggaagtcaaagagttcttccgctgggcgcaggatcacgtgaccgaggtggcgcatgagttctacgtcagaaagggtggagccaacaagagacccgcccccgatgacgcggataaaagcgagcccaagcgggcccgcccctcagtcgcggatccatcgacgtcagacgcggaaggagctccggtggactttgccgacaggtaccaaaacaaatgttctcgtcacgcgggcatgcttcagatgctgtttccctgcaaaacatgcgagagaatgaatcagaatttcaacatttgcttcacgcacgggaccagagactgttcagaatgtttccccggcgtgtcagaatctcaaccggtcgtcagaaagaggacgtatcggaaactctgtgccattcatcatctgctggggcgggctcccgagattgcttgctcggcctgcgatctggtcaacgtggacctggatgactgtgtttctgagcaataaatgacttaaaccaggtatggctgccgatggttatcttccagattggctcgaggacaacctctctgagggcattcgcgagtggtgggacttgaaacctggagccccgaaacccaaagccaaccagcaaaagcaggacgacggccggggtctggtgcttcctggctacaagtacctcggacccttcaacggactcgacaagggagagccggtcaacgaggcagacgccgcggccctcgagcacgacaaggcctacgacaagcagctcgagcagggggacaacccgtacctcaagtacaaccacgccgacgccgagtttcaggagcgtcttcaagaagatacgtcttttgggggcaacctcgggcgagcagtcttccgggccaagaagcgggttctcgaacctctcggtctggttgaggaaggcgctaagacggctcctggaaagaagagacccatagaatcccccgactcctccacgggcatcggcaagaaaggccagcagcccgctaaaaagaagctcaactttgggcagactggcgactcagagtcagtgcccgacccccaacctctcggagaacctcccgccgcgccctcaggtctgggatctggtacaatggctgcaggcggtggcgcaccaatggcagacaataacgaaggcgccgacggagtgggtaatgcctccggaaattggcattgcgattccacatggctgggcgacagagtcatcaccaccagcacccgcacctgggccctgcccacctacaacaaccacctctacaagcagatatcaagtcagagcggggctaccaacgacaaccacttcttcggctacagcaccccctggggctattttgacttcaacagattccactgccacttctcaccacgtgactggcagcgactcatcaacaacaaccggggattccggcccagaaagctgcggttcaagttgttcaacatccaggtcaaggaggtcacgacgaacgacggcgttacgaccatcgctaataaccttaccagcacgattcaggtcttctcggactcggagtaccaactgccgtacgtcctcggctctgcgcaccagggctgcctccctccgttccctgcggacgtgttcatgattcctcagtacggatatctgactctaaacaacggcagtcagtctgtgggacgttcctccttctactgcctggagtactttccttctcagatgctgagaacgggcaataactttgaattcagctaccagtttgaggacgtgccctttcacagcagctacgcgcacagccaaagcctggaccggctgatgaaccccctcatcgaccagtacctgtactacctgtctcggactcagtccacgggaggtaccgcaggaactcagcagttgctattttctcaggccgggcctaataacatgtcggctcaggccaaaaactggctacccgggccctgctaccggcagcaacgcgtctccacgacactgtcgcaaaataacaacagcaactttgcttggaccggtgccaccaagtatcatctgaatggcagagactctctggtaaatcccggtgtcgctatggcaacgcacaaggacgacgaagagcgattttttccatccagcggagtcttgatgtttgggaaacagggagctggaaaagacaacgtggactatagcagcgttatgctaaccagtgaggaagaaatcaaaaccaccaacccagtggccacagaacagtacggcgtggtggccgataacctgcaacagcaaaacgccgctcctattgtaggggccgtcaacagtcaaggagccttacctggcatggcctggcagaaccgggacgtgtacctgcagggtcctatctgggccaagattcctcacacggacggcaactttcatccttcgccgctgatgggaggctttggactgaaacacccgcctcctcagatcctgattaagaatacacctgttcccgcggatcctccaactaccttcagtcaagccaagctggcgtcgttcatcacgcagtacagcaccggacaggtcagcgtggaaattgaatgggagctgcagaaagagaacagcaagcgctggaacccagagattcagtatacttccaactactacaaatctacaaatgtggactttgctgtcaatactgagggtacttattcagagcctcgccccattggcacccgttacctcacccgtaacctgtaattgcctgttaatcaataaaccggttaattcgtttcagttgaactttggtctctgcgaagggcgaattc

SEQ ID NO: 4962 - DNA, 3197 bp, Adeno-associated virus
  source 1..3197: mol_type = genomic DNA
gaattcgccctttctacggctgcgtcaactggaccaatgagaactttcccttcaacgattgcgtcgacaagatggtgatctggtgggaggagggcaagatgacggccaaggtcgtggagtccgccaaggccattctcggcggcagcaaggtgcgcgtggaccaaaagtgcaagtcgtccgcccagatcgaccccacccccgtgatcgtcacctccaacaccaacatgtgcgccgtgattgacgggaacagcaccaccttcgagcaccagcagccgttacaagaccggatgttcaaatttgaactcacccgccgtctggagcacgactttggcaaggtgacaaagcaggaagtcaaagagttcttccgctgggcgcaggatcacgtgaccgaggtggcgcatgagttctacgtcagaaagggtggagccaacaagagacccgcccccgatgacgcggataaaagcgagcccaagcgggcctgcccctcagtcgcggatccatcgacgtcagacgcggaaggagctccggtggactttgccgacaggtaccaaaacaaatgttctcgtcacgcgggcatgcttcagatgctgtttccctgcaagacatgcgagagaatgaatcagaatttcaacatttgcttcacgcacgggaccagagactgttcagaatgtttccccggcgtgtcagaatctcaaccggtcgtcagaaagaggacgtatcggaaactctgtgccattcatcatctgctggggcgggctcccgagattgcttgctcggcctgcgatctggtcaacgtggacctggatgactgtgtttctgagcaataaatgacttaaaccaggtatggctgccgatggttatcttccagattggctcgaggacaacctctctgagggcattcgcgagtggtgggacttgaaacctggagccccgaaacccaaagccaaccagcaaaagcaggacgacggccggggtctggtgcttcctggctacaagtacctcggacccttcaacggactcgacaagggagagccggtcaacgaggcagacgccgcggccctcgagcacgacaaggcctacgacaagcagctcgagcagggggacaacccgtacctcaagtacaaccacgccgacgccgagtttcaggagcgtcttcaagaagatacgtcttttgggggcaacctcgggcgagcagtcttccaggccaagaagcgggttctcgaacctctcggtctggttgaggaaggcgctaagacggctcctggaaagaagagaccggtagagccatcaccccagcgttctccagactcctctacgggcatcggcaagacaggccagcagcccgcgaaaaagagactcaactttgggcagactggcgactcagagtcagtgcccgaccctcaaccaatcggagaaccccccgcaggcccctctggtctgggatctggtacaatggctgcaggcggtggcgctccaatggcagacaataacgaaggcgccgacggagtgggtagttcctcaggaaattggcattgcgattccacatggctgggcgacagagtcatcaccaccagcacccgaacctgggccctccccacctacaacaaccacctctacaagcaaatctccaacgggacatcgggaggaagcaccaacgacaacacctacttcggctacagcaccccctgggggtattttgactttaacagattccactgccacttctcaccacgtgactggcagcgactcatcaacaacaactggggattccggcccaagagactcaacttcaagctcttcaacatccaggtcaaggaggtcacgcagaatgaaggcaccaagaccatcgccaataaccttaccagcacgattcaggtctttacggactcggaataccagctcccgtacgtcctcggctctgcgcaccagggctgcctgcctccgttcccggcggacgtcttcatgattcctcagtacgggtacctgactctgaacaacggcagtcaggccgtgggccgttcctccttctactgcctggagtactttccttctcaaatgctgagaacgggcaacaactttgagttcagctaccagtttgaggacgtgccttttcacagcagctacgcgcacagccaaagcctggaccggctgatgaaccccctcatcgaccagtacctgtactacctgtctcggactcagtccacgggaggtaccgcaggaactcagcagttgctattttctcaggccgggcctaataacatgtcggctcaggccaaaaactggctacccgggccctgctaccggcagcaacgcgtctccacgacactgtcgcaaaataacaacagcaactttgcttggaccggtgccaccaagtatcatctgaatggcagagactctctggtaaatcccggtgtcgctatggcaacgcacaaggacgacgaagagcgattttttccatccagcggagtcttgatgtttgggaaacagggagctggaaaagacaacgtggactatagcagcgttatgctaaccagtgaggaagaaatcaaaaccaccaacccagtggccacagaacagtacggcgtggtggccgataacctgcaacagcaaaacgccgctcctattgtaggggccgtcaacagtcaaggagccttacctggcatggtctggcagaaccgggacgtgtacctgcagggtcctatctgggccaagattcctcacacggacggcaactttcatccttcgccgctgatgggaggctttggactgaaacacccgcctcctcagatcctgattaagaatacacctgttcccgcggatcctccaactaccttcagtcaagccaagctggcgtcgttcatcacgcagtacagcaccggacaggtcagcgtggaaattgaatgggagctgcagaaagagaacagcaagcgctggaacccagagattcagtatacttccaactactacaaatctacaaatgtggactttgctgtcaatactgagggtacttattcagagcctcgccccattggcacccgttacctcacccgtaacctgtaattgcctgttaatcaataaaccggttaattcgtttcagttgaactttggtctctgcgaagggcgaattcgtttaaacctgcaggactagtccctttagtgagggttaattctgagcttggcgtaatcatgggtcatag

SEQ ID NO: 4963 - DNA, 3276 bp, Adeno-associated virus
  source 1..3276: mol_type = genomic DNA
gaattcgcccttcgcagagaccaaagttcaactgaaacgaattaaccggtttattgattaacaggcaattacaggttacgggtgaggtaacgggtgccaatggggcgaggctcagtataaaccccttcgttgttgacagcaaattccacattattagacttggcataatttgaggtgtactgaatctctggattccagcgtttgctgttttctttctgcagttcccactcgatctccacgctgacctggccggtgctgtactgcgtgataaatgaggcaaacttggcaggagtaaacacctctggaggattagcaggtaccggggtgtttttgatgagaatttgaggaggcgggtgtttgagtccaaatccgtccatcaggggagacgggtgaaagttgccgtccgtgtgaggaattttggcccagatgggaccctgcaggtacacgtcccggttctgccagaccatgccgggcagagccccctggctgttgacagtctgtgtctggggtccggccgtagacgattgcaggttgctggagaccacaccgtattcttctgtagccacgggattggtggttttgatctcctcctcgctggtcattagcacgttttccagcgttgtcttgttggcagcccccgttttgccaaaaaccagcactccgttgatgggaaagaactggtcctcgtcgtccttgttggtggccatggctacgcccgggttggttaatgaatttctaccattcagatggtatttagtggccccggtccaggcaaagttactgttgttgttgctgtctatgttttttgacagtctctgctgccgataacagggtccgggcagccagttctttgattgctcggccatggtgttgggcccagcctgatggaactgcagctcccttgtggaccccgtagtgctctgggtccgggccaggtagtacaggtactggtcgatgaggggattcatcagccggtccaggctctggctatgcgcatagctgctgtggaaaggcacttcctcaaaggtgtagctgaattcaaagttattgcccgttctcagcatctgagaaggaaagtactccaggcagtagaaggaggaacgtcccacagactgactgccgttgtttagagtcagatatccgtactgaggaatcatgaacacgtccgcagggaacggagggaggcagccctggtgcgcagagccgaggacgtacggcagttggtactccgagtccgagaagacctgaatcgtgctggtaaggttattagcgatggtcgtaacgccgtcgtccgtcgtgacctccttgacctggatgttgaacaacttgaaccgcagctttctgggccggaatccccagttgttgttgatgagtcgctgccagtcacgtggtgagaagtggcagtggaatctgttaaagtcaaaatacccccagggggtgctgtagccgaagtaggtgttgtcgttggtgcttcctcccgatgtcccgttggagatttgcttgtagaggtggttgttgtaggtggggagggcccaggttcgggtgctggtggtgatgactctgtcgcccagccatgtggaatcgcaatgccaatttcctgaggaactacccactccgtcggcgccttcgttattgtctgccattggagcgccaccgcctgcagccattgtaccagatcccagaccagaggggcctgcggggggttctccgattggttgagggtcgggcactgactctgagtcgccagtctgcccaaagttgagtctctttttcgcgggctgctggcctgtcttgccgatgcccgtagaggagtctggagaacgctggggtgatggctctaccggtctcttctttccaggagccgtcttagcgccttcctcaaccagaccgagaggttcgagaacccgcttcttggcctggaagactgctcgcccgaggttgcccccaaaagacgtatcttcttgaagacgctcctgaaactcggcgtcggcgtggttgtacttgaggtacgggttgtccccctgctcgagctgcttgtcgtaggccttgtcgtgctcgagggccgcggcgtctgcctcgttgaccggctctcccttgtcgagtccgttgaagggtccgaggtacttgtagccaggaagcaccagaccccggccgtcgtcctgcttttgctggttggctttgggtttcggggctccaggtttcaagtcccaccactcgcgaatgccctcagagaggttgtcctcgagccaatctggaagataaccatcggcagccatacctggtttaagtcatttattgctcagaaacacagtcatccaggtccacgttgaccagatcgcaggccgagcaagcaatctcgggagcccgccccagcagatgatgaatggcacagagtttccgatacgtcctctttctgacgaccggttgagattctgacacgccggggaaacattctgaacagtctctggtcccgtgcgtgaagcaaatgttgaaattctgattcattctctcgcatgtcttgcagggaaacagcatctgaagcatgcccgcgtgacgagaacacttgttttggtacctgtcggcaaagtccaccggagctccttccgcgtctgacgtcgatggatgcaaaatgtcgcaaaagcactcacgtgacagctaatacaggaccactcccctatgacgtgatttacgtcagcgctatgcccgcgtgacgagaacatttgttttggtacctgtcggcaaagtccaccggagctccttccgcgtctgacgtcgatggatccgcgactgaggggcaggcccgcttgggctcgcttttatccgcgtcatcgggggcgggtctcttgttggctccaccctttctgacgtagaactcatgcgccacctcggtcacgtgatcctgcgcccagcggaagaactctttgacttcctgctttgtcaccttgccaaagtcatgctccagacggcgggtgagttcaaatttgaacatccggtcctgcaacggctgctggtgctcgaaggtggtgctgttcccgtcaatcacggcgcacatgttggtgttggaagtgacgatcacgggggtgggatcgatctgggcggaagacttgcacttttggtccacgcgcaccttgctgccgccgagaatggccttggcggactccacgaccttggccgtcatcttgccctcctcccaccagatcaccatcttgtcgacgcaatcgttgaagggaaagttctcattggtccagttgacgcagccgtagaaagggcgaattc

SEQ ID NO: 4964 - protein, 738 aa, Adeno-associated virus; identical to SEQ ID NO: 4740

SEQ ID NO: 4965 - protein, 738 aa, Adeno-associated virus
MAADGYLPDWLEDNLSEGIREWWDLKPGAPKPKANQQKQDDGRGLVLPGYKYLGPFNGLDKGEPVNAADAAALEHDKAYDQQLKAGDNPYLRYNHADAEFQERLQEDTSFGGNLGRAVFQAKKRVLEPLGLVEEGAKTAPGKKRPVEPSPQRSPDSSTGIGKKGHQPARKRLNFGQTGDSESVPDPQPIGEPPAGPSGLGSGTMAAGGGAPMADNNEGADGVGSSSGNWHCDSTWLGDRVITTSTRTWALPTYNNHLYKQISNGTSGGSTNDNTYFGYSTPWGYFDFNRFHCHFSPRDWQRLINNNWGFRPKRLNFKLFNIQVKEVTQNEGTKTIANNLTSTIQVFTDSEYQLPYVPGSAHQGCLPPFPADVFMIPQYGYLTLNNGSQAVGRSSFYCLEYFPSQMLRTGNNFEFSYTFEDVPFHSSYAHSQSLDRLMNPLIDQYLYYLSRTQSTGGTQGTQQLLFSQAGPANMSAQAKNWLPGPCYRQQRVSTTLSQNNNSNFAWTGATKYHLNGRDSLVNPGVAMATHKDDEERFFPSSGVLMFGKQGAGKDNVDYSSVMLTSEEEIKTTNPVATEQYGVVADNLQQTNGAPIVGTVNSQGALPGMVWQNRDVYLQGPIWAKIPHTDGNFHPSPLMGGFGLKHPPPQILIKNTPVPADPPTTFSQAKLASFITQYSTGQVSVEIEWELQKENSKRWNPEIQYTSNYYKSTNVDFAVNTEGTYSEPRPIGTRYLTRNL

SEQ ID NO: 4966 - protein, 738 aa, Adeno-associated virus; identical to SEQ ID NO: 4738

SEQ ID NO: 4967 - DNA, 2489 bp, Adeno-associated virus
  source 1..2489: mol_type = genomic DNA
gaattcgccctttctacggctgcgtcaactggaccaatgagaactttcccttcaacgattgcgtcgacaagatggtgatctggtgggaggagggcaagatgacggccaaggtcgtgaagtccgccaaggccattcatcatctgctggggcgggctcccgagattgcttgctcggcctgcgatctggtcaacgtggacctggatgactgtgtttctgagcaataaatgacttaaaccaggtatggctgccgatggttatcttccagattggctcgaggacaacctctctgagggcattcgcgagtggtgggacttgaaacctggagccccgaaacccaaagccaaccagcaaaagcaggacgacggccggggtctggtgcttcctggctacaagtacctcggacccttcaacggactcgacaagggagagccggtcaacgaggcagacgccgcggccctcgagcacgacaaggcctacgacaagcagctcgagcagggggacaacccgtacctcaagtacaaccacgccgacgccgagtttcaggagcgtcttcaagaagatacgtcttttgggggcaacctcgggcgagcagtcttccaggccaagaagcgggttctcgaacctctcggtctggttgaggaaggcgctaagacggctcctggaaagaagagacccatagaatcccccgactcctccacgggcatcggcaggaaaggccagcagcccgctaaaaagaagctcaactttgggcagactggcgactcagagtcagtgcccgaccctcaaccaatcggagaaccccccgcaggcccctctggtctgggatctggtacaatggctgcaggcggtggcgctccaatggcagacaataacgaaggcgccgacggagtgggtaatgcctccggaaattggcattgcgattccacatggctgggcgacagagtcatcaccaccagcacccgcacctgggccctgcccacctacaacaaccacctctacaagcagatatcaagtcagagcggggctaccaacgacaaccacttcttcggctacagcaccccctggggctattttgacttcaacagattccactgccacttctcaccacgtgactggcagcgactcatcaacaacaactggggattccggcccagaaagctgcggttcaagttgttcaacatccaggtcaaggaggtcacgacgaacgacggcgttacgaccatcgccaataaccttaccagcacgattcaggtcttctcggactcggagtaccaactgccgtacgtcctcggctctgcgcaccagggctgcctccctccgttccctgcggacgtgttcatgattcctcagtacggatatctgactctaaacaacggcagtcagtctgtgggacgttcctccttctactgcctggagtactttccttctcagatgctgagaacgggcaataactttgaattcagctacacctttgaggaagtgcctttccacagcagctatgcgcacagccagagcctggaccggctgatgaatcccctcatcgaccagtacctgtactacctggcccggacccagagcactacggggtccacaagggagctgcagttccatcaggctgggcccaacaccatggccgagcaatcaaagaactggctgcccggaccctgttatcggcagcagagactgtcaaaaaacatagacagcaacaacaacagtaactttgcctggaccggggccactaaataccatctgaatggtagaaattcattaaccaacccgggcgtagccatggccaccaacaaggacgacgaggaccagttctttcccatcaacggagtgctggtttttggcaaaacgggggctgccaacaagacaacgctggaaaacgtgctaatgaccagcgaggaggagatcaaaaccaccaatcccgtggctacagaagaatacggtgtggtctccagcaacctgcaatcgtctacggccggaccccagacacagactgtcaacagccagggggctctgcccggcatggtctggcagaaccgggacgtgtacctgcagggtcccatctgggccaaaattcctcacacggacggcaactttcacccgtctcccctgatgggcggatttggactcaaacacccgcctcctcaaattctcatcaaaaacaccccggtacctgctaatcctccagaggtgtttactcctgccaagtttgcctcatttatcacgcagtacagcaccggccaggtcagcgtggagatcgagtgggaactgcagaaagaaaacagcaaacgctggaatccagagattcagtacacctcaaattatgccaagtctaataatgtggaatttgctgtcaacaacgaaggggtttatactgagcctcgccccattggcacccgttacctcacccgtaacctgtaattgcctgttaatcaataaaccggttaattcgtttcagttgaactttggtcaagggcgaattc

SEQ ID NO: 4968 - DNA, 3098 bp, Adeno-associated virus
  source 1..3098: mol_type = genomic DNA
gaattcgccctttctacggctgcgtcaactggaccaatgagaactttcccttcaacgattgcgtcgacaagatggtgatctggtgggaggagggcaagatgacggccaaggtcgtggagtccgccaaggccattctcggcggcagcaaggtgcgcgtggaccaaaagtgcaagtcttccgcccagatcgatcccacccccgtgatcgtcacttccaacaccaacatgtgcgccgtgattgacgggaacagcaccaccttcgagcaccagcagccgttacaagaccggatgttcaaatttgaactcacccgccgtctggagcacgactttggcaaggtgacaaagcaggaagtcaaagagttcttccgctgggcgcaggatcacgtgaccgaggtggcgcatgagttctacgtcagaaagggtggagccaacaagagacccgcccccgatgacgcggataaaagcgagcccaagcgggcctgcccctcagtcgcggatccatcgacgtcagacgcggaaggagctccggtggactttgccgacaggtaccaaaacaaatgttctcgtcacgcgggcatgcttcagatgctgtttccctgcaagacatgcgagagaatgaatcagaatttcaacatttgcttcacgcacgggaccggagactgttcagaatgtttccccggcgtgtcagaatctcaaccggtcgtcagaaagaggacgtatcggaaactctgtgccattcatcatctgctggggcgggctcccgagattgcttgctcggcctgcgatctggtcaacgtggacctggatgactgtgtttctgagcaataaatgacttaaaccaggtatggctgccgatggttatcttccagattggctcgaggacaacctctctgagggcattcgcgagtggtgggacttgaaacctggagccccgaaacccaaagccaaccagcaaaagcaggacgacggccggggtctggtgcttcctggctacaagtacctcggacccttcaacggactcgacaagggagagccggtcaacgcggcggacgcagcggccctcgagcacgacaaggcctacgaccagcagctcaaagcgggtgacaatccgtacctgcggtataaccacgccgacgccgagtttcaggagcgtcttcaagaagatacgtcttttgggggcaacctcgggcgagcagtcttccaggccaagaagcgggttctcgaacctctcggtctggttgaggaaggcgctaagacggctcctggaaagaagagacccatagaatcccccgactcctccacgggcatcggcaagaaaggccagcagcccgctaaaaagaagctcaactttgggcagactggcgactcagagtcagtgcccgaccctcaaccaatcggagaaccccccgcaggcccctctggtctgggatctggtacaatggctgcaggcggtggcgctccaatggcagacaataacgaaggcgccgacggagtgggtaatgcctccggaaattggcattgcgattccacatggctgggcgacagagtcatcaccaccagcacccgcacctgggccctgcccacctacaacaaccacctctacaagcagatatcaagtcagagcggggctaccaacgacaaccacttcttcggctacagcaccccctggggctattttgacttcaacagattccactgccacttctcaccacgtgactggcagcgactcatcaacaacaactggggattccggcccagaaagctgcggttcaagttgttcaacatccaggtcaaggaggtcacgacgaacgacggcgttacgaccatcgctaataaccttaccagcacgattcaggtcttctcggactcggagtaccaactgccgtacgtcctcggctctgcgcaccagggctgcctccctccgttccctgcggacgtgttcatgattcctcagtacggatatctgactctaaacaacggcagtcagtctgtgggacgttcctccttctactgcctggagtactttccttctcagatgctgagaacgggcaataactttgaattcagctacacctttgaggaagtgcctttccacagcagctatgcgcacagccagagcctggaccggctgatgaatcccctcatcgaccagtacctgtactacctggcccggacccagagcactacggggtccacaagggagctgcagttccatcaggctgggcccaacaccatggccgagcaatcaaagaactggctgcccggaccctgttatcggcggcagagactgtcaaaagacatagacagcaacaacaacagtaactttgcctggaccggggccactaaataccatctgaatggtagaaattcattaaccaacccgggcgtagccatggccaccaacaaggacgacgaggaccagttctttcccatcaacggagtgctggtttttggcaaaacgggggctgccaacaagacaacgctggaaaacgtgctaatgaccagcgaggaggagatcaaaaccaccaatcccgtggctacagaagaatacggtgtggtctccagcaacctgcaatcgtctacggccggaccccagacacagactgtcaacagccagggggctctgcccggcatggtctggcagaaccgggacgtgtacctgcagggtcccatctgggccaaaattcctcacacggacggcaactttcacccgtctcccctgatgggcggatttggactcaaacacccgcctcctcaaattctcatcaaaaacaccccggtacctgctaatcctccagaggtgtttactcctgccaagtttgcctcatttatcacgcagtacagcaccggccaggtcagcgtggagatcgagtgggaactgcagaaagagaacagcaaacgctggaatccagagattcagtacacctcaaattatgccaagtctaataatgtggaatttgctgtcaacaacgaaggggtttatactgagcctcgccccattggcacccgttacctcacccgtaacctgtaattacttgttaatcaataaaccggttgattcgtttcagttgaactttggtctctgcgaagggcgaattc

SEQ ID NO: 4969 - DNA, 2969 bp, Adeno-associated virus
  source 1..2969: mol_type = genomic DNA
gaattcgccctttctacggctgcgtcaactggaccaatgagaactttcccttcaacgattgcgtcgacaagatggtgatctggtgggaggagggcaagatgacggccaaggtcgtggagtccgccaaggccattctcggcggcagcaaggtgcgcgtggaccaaaagtgcaagtcgtccgcccagatcgaccccacccccgtgatcgtcacctccaacaccaacatgtgcgccgtgattgacgggaacagcaccaccttcgagcaccagcagccgttacaagaccggatgttcaaatttgaactcacccgccgtctggagcacgactttggcaaggtgacaaagcaggaagtcaaagagttcttccgctgggcgcaggatcacgtgaccgaggtggcgcatgagttctacgtcagaaagggtggagccaacaagagacccgcccccgatgacgcggataaaagcgagcccaagcgggcctgcccctcagtcgcggatccatcgacgtcagacgcggaaggagctccggtggactttgccgacaggtaccaaaacaaatgttctcgtcacgcgggcatgcttcagatgctgtttccctgcaagacatgcgagagaatgaatcagaatttcaacatttgcttcacgcacgggaccagagactgttcagaatgtttccccggcgtgtcagaatctcaaccggtcgtcagaaagaggacgtatcggaaactctgtgccattcatcatctgctggggcgggctcccgagattgcttgctcggcctgcgatctggtcaacgtggacctggatgactgtgtttctgagcaataaatgacttaaaccaggtatggctgccgatggttatcttccagattggctcgaggacaacctctctgagggcatccgcgagtggtgggacttgaaacctggagccccgaaacccaaagccaaccagcaaaagcaggacgacggccggggtctggtgcttcctggctacaagtacctcggacccttcaacggactcgacaagggagagccggtcaacgaggcagacgccgcggccctcgagcacgacaaggcctacgacaagcagctcgagcagggggacaacccgtacctcaagtacaaccacgccgacgccgagtttcaggagcgtcttcaagaagatacgtcttttgggggcaacctcgggcgagcagtcttccaggccaagaagcgggttctcgaacctctcggtctggttgaggaaggcgctaagacggctcctggaaagaagagaccggtagagccatcaccccagcgttctccagactcctctacgggcatcggcaagacaggccagcagcccgcgaaaaagagactcaactttgggcagactggcgactcagagtcagtgcccgaccctcaaccaatcggagaaccccccgcaggcccctctggtctgggatctggtacaatggctgcaggcggtggcgctccaatggcagacaataacgaaggcgccgacggagtgggtagttcctcaggaaattggcattgcgattccacatggctgggcgacagagtcatcaccaccagcacccgaacctgggccctccccacctacaacaaccacctctacaagcaaatctccaacgggacatcgggaggaagcaccaacgacaacacctacttcggctacagcaccccctgggggtattttgactttaacagattccactgccacttctcaccacgtgactggcagcgactcatcaacaacaactggggattccggcccaagagactcaacttcaagctcttcaacatccaggtcaaggaggtcacgcagaatgaaggcaccaagaccatcgccaataaccttaccagcacgattcaggtctttacggactcggaataccagctcccgtacgtcctcggctctgcgcaccagggctgcctgcctccgttcccggcggacgtcttcatgattcctcagtacgggtacctgactctgaacaacggcagtcaggccgtgggccgttcctccttctactgcctggagtactttccttctcaaatgctgagaacgggcaacaactttgagttcagctaccagtttgaggacgtgccttttcacagcagctacgcgcacagccaaagcctggaccggctgacgaaccccctcatcgaccagtacctgtactacctggcccggacccagagcactacggggtccacaagggggctgcagttccatcaggctgggcccaacaccatggccgagcaatcaaagaactggctgcccggaccctgttatcggcagcagagactgtcaaaaaacatagacagcaacaacaacagtaactttgcctggaccggggccactaaataccatctgaatggtagaaattcattaaccaacccgggcgtagccatggccaccaacaaggacgacgaggaccagttctttcccatcaacggagtgctggtttttggcaaaacgggggctgccaacaagacaacgctggaaaacgtgctaatgaccagcgaggaggagatcaaaaccaccaatcccgtggctacagaagaatacggtgtggtctccagcaacctgcaatcgtctacggccggaccccagacacagactgtcaacagccagggggctctgcccggcatggtctggcagaaccgggacgtgtacctgcagggtcccatctgggccaaaattcctcacacggacggcaactttcacccgtctcccctgatgggcggatttggactcaaacacccgcctcctcaaattctcatcaagtatacttccaactactacaaatctacaaatgtggactttgctgtcaatactgagggtacttattcagagcctcgccccattggcacccgttacctcacccgtaacctgtaattgcctgttaatcaataaaccggttaattcgtttcagttgaactttggtctctgcgaagggcgaattc

SEQ ID NO: 4970 - DNA, 3113 bp, Adeno-associated virus
  source 1..3113: mol_type = genomic DNA
gaattcgccctttctacggctgcgtcaactggaccaatgagaactttcccttcaacgattgcgtcgacaagatggtgatctggtgggaggagggcaagatgacggccaaggtcgtggagtccgccaaggccattctcggcggcagcaaggtgcgcgtggaccaaaagtgcaagtcgtccgcccagatcgatcccacccccgtgatcgtcacttccaacaccaacatgtgcgccgtgattgacgggaacagcaccaccttcgagcaccagcagccgttacaagaccggatgttcaaatttgaactcacccgccgtctggagcatgactttggcaaggtgacaaagcaggaagtcaaagagttcttccgctgggcgcaggatcacgtgaccgaggtggcgcatgagttctacgtcagaaagggtggagccaacaagagacccgcccccgatgacgcggataaaagcgagcccaagcgggcctgcccctcagtcgcggatccatcgacgtcagacgcggaaggagctccggtggactttgccgacaggtaccaaaacaaatgttctcgtcacgcgggcatgcttcagatgctgtttccctgcaagacatgcgagagaatgaatcagaatttcaacatttgcttcacgcacgggaccagagactgttcagaatgtttccccggcgtgtcagaatctcaaccggtcgtcagaaagaggacgtatcggaaactctgtgccattcatcatctgctggggcgggctcccgagattgcttgctcggcctgcgatctggtcaacgtggacctggatgactgtgtttctgagcaataaatgacttaaaccaggtatggctgccgatggttatcttccagattggctcgaggacaacctctctgagggcattcgcgagtggtgggacttgaaacctggagccccgaaacccaaagccaaccagcaaaagcaggacgacggccggggtctggtgcttcctggctacaagtacctcggacccttcaacggactcgacaagggggagcccgtcaacgcggcggacgcagcggccctcgagcacgacaaggcctacgaccagcagctcaaagcgggtgacaatccgtacctgcggtataaccacgccgacgccgagtttcaggagcgtcttcaagaagatacgtcttttgggggcaacctcgggcgagcagtcttccaggccaagaagcgggttctcgaacctctcggtctggttgaggaaggcgctaagacggctcctggaaagaagagacccatagaatcccccgactcctccacgggcatcggcaagaaaggccagcagcccgctaaaaagaagctcaactttgggcagactggcgactcagagtcagtgcccgaccctcaaccaatcggagaaccccccgcaggcccctctggtctgggatctggtacaatggctgcaggcggtggcgctccaatggcagacaataacgaaggcgccgacggagtgggtagttcctcaggaaattggcattgcgattccacatggctgggcgacagagtcatcaccaccagcacccgaacctgggccctccccacctacaacaaccacctctacaagcaaatctccaacgggacatcgggaggaagcaccaacgacaacacctacttcggctacagcaccccctgggggtattttgactttaacagattccactgccacttctcaccacgtgactggcagcgactcatcaacaacaactggggattccggcccaagagactcaacttcaagctcttcaacatccaggtcaaggaggtcacgcagaatgaaggcaccaagaccatcgccaataaccttaccagcacgattcaggtctttacggactcggaataccagctcccgtacgtcctcggctctgcgcaccagggctgcctgcctccgttcccggcggacgtcttcatgattcctcagtacgggtacctgactctgaacaacggcagtcaggccgtgggccgttcctccttctactgcctggagtactttccttctcaaatgctgagaacgggcaacaactttgagttcagctaccagtttgaggacgtgccttttcacagcagctatgcgcacagccaaagcctggaccggctgatgaaccccctcatcgaccagtacctgtactacctgtctcggactcagtccacgggaggtaccgcaggaactcagcagttgctattttctcaggccgggcctaataacatgtcggctcaggccaaaaactggctacccgggccctgctaccggcagcaacgcgtctccacgacagtgtcgcaaaataacaacagcaactttgcttggaccggtgccaccaagtatcatctgaatggcagagactctctggtaaatcccggtgtcgctatggcaacgcacaagggcgacgaagagcgattttttccatccagcggagtcttgatgtttgggaaacagggagctggaaaagacaacgtggactatagcagcgttatgctaaccagtgaggaagaaatcaaaaccaccaacccagtggccacagaacagtacggcgtggtggccgataacctgcaacagcaaaacgccgctcctattgtaggggccgtcaacagtcaaggagccttacctggcatggtctggcagaaccgggacgtgtacctgcagggtcctatctgggccaagattcctcacacggacggcaactttcatccttcgccgctgatgggaggctttggactgaaacacccgcctcctcagatcctgattaagaatacacctgttcccgcggatcctccaactaccttcagtcaagccaagctggcgtcgttcatcacgcagtacagcaccggacaggtcagcgtggaaattgaatgggagctgcagaaagagaacagcaagcgctggaacccagagattcagtatacttccaactactacaaatctacaaatgtggactttgctgtcaatactgagggtacttattcagagcctcgccccattggcacccgttacctcacccgtagcctgtaattgcctgttaatcaataaaccggttgattcgtttcagttgaactttggtctctgcgaagggcgaattc

SEQ ID NO: 4971 - DNA, 3128 bp, Adeno-associated virus
  source 1..3128: mol_type = genomic DNA
gaattcgccctttctacggctgcgtcaactggaccaatgagaactttcccttcaacgattgcgtcgacaagatggtgatctggtgggaggagggcaagatgacggccaaggtcgtggagtccgccaaggccattctcggcggcagcaaggtgcgcgtggaccaaaagtgcaagtcgtccgcccagatcgaccccacccccgtgatcgtcacctccaacaccaacatgtgcgccgtgattgacgggaacagcaccaccttcgagcaccagcagccgttgcaggaccggatgttcaaatttgaactcacccgccgtctggagcatgactttggcaaggtgacaaagcaggaagtcaaagagttcttccgctgggcgcaggatcacgtgaccgaggtggcgcatgagttctacgtcagaaagggtggagccaacaagagacccgcccccgatgacgcggataaaagcgagcccaagcgggcctgcccctcagtcgcggatccatcgacgtcagacgcggaaggagctccggtggactttgccgacaggtaccaaaacaaatgttctcgtcacgcgggcatgcttcagatgctgtttccctgcaagacatgcgagagaatgaatcagaatttcaacatttgcttcacgcgcgggaccagagactgttcagaatgtttcccgggcgtgtcagaatctcaaccggtcgtcagaaagaggacgtatcggaaactctgtgccattcatcatctgctggggcgggctcccgagattgcttgctcggcctgcgatctggtcaacgtggacctggatgactgtgtttctgagcaataaatgacttaaaccaggtatggctgccgatggttatcttccagattggctcgaggacaacctctctgagggcattcgcgagtggtgggacttgaaacctggagccccgaaacccaaagccaaccagcaaaagcaggacgacggccggggtctggtgcttcctggctacaagtacctcggacccttcaacggactcgacaagggggagcccgtcaacgcggcggacgcagcggccctcgagcacgacaaggcctacgaccagcagctcaaagcgggtgacaatccgtacctgcggtataaccacgccgacgccgagtttcaggagcgtctgcaagaagatacgtcttttgggggcaacctcgggcgagcagtcttccaggccaagaagcgggttctcgaacctctcggtctggttgaggaaggcgctaagacggctcctggaaagaagagaccggtagagccatcaccccagcgttctccagactcctctacgggcatcggcaagacaggccagcagcccgcgaaaaagagactcaactttgggcagactggcgactcagagtcagtgcccgaccctcaaccaatcggagaaccccccgcaggcccctctggtctgggatctggtacaatggctgcaggcggtggcgctccaatggcagacaataacgaaggcgccgacggagtgggtagttcctcaggaaattggcattgcgattccacatggctgggcgacagagtcatcaccaccagcacccgaacctgggccctccccacctacaacaaccacctctacaagcaaatctccaacgggacatcgggaggaagcaccaacgacaacacctacttcggctacagcaccccctgggggtattttgactttaacagattccactgccacttctcaccacgtgactggcagcgactcatcaacaacaactggggattccggcccaagagactcaacttcaagctcttcaacatccaggtcaaggaggtcacgcagaatgaaggcaccaagaccatcgccaataaccttaccagcacgattcaggtctttacggactcggaataccagctcccgtacgtcctcggctctgcgcaccagggctgcccgcctccgttcccggcggacgtcttcatgattcctcagtacgggtacctgactctgaacaacggcagtcaggccgtgggccgttcctccttctactgcctggagtactttccttctcaaatgcggagaacgggcaacaactttgagttcagctaccagtttgaggacgtgccttttcacagcagctacgcgcatagccaaagcctggaccggctgatgaaccccctcatcgaccagtacctgtactacctgtctcggactcagtccacgggaggtaccgcaggaactcagcagttgctattttctcaggccgggcctaataacatgtcggctcaggccaaaaactggctacccgggccctgctaccggcagcaacgcgtctccacgacactgtcgcaaaataacaacagcaactttgcttggaccggtgccaccaagtatcatctgaatggcagagactctctggtaaatcccggtgtcgctatggcaacgcacaaggacgacgaagagcgattttttccatccagcggagtcttgatgtttgggaaacagggagctggaaaagacaacgtggactatagcagcgttatgctaaccagtgaggaagaaatcaaaaccaccaacccagtggccacagaacagtacggcgtggtggccgataacctgcaacagcaaaacgccgctcctattgtaggggccgtcaacagtcaaggagccttacctggcatggtctggcagaaccgggacgtgtacctgcagggtcctatctgggccaagattcctcacacggacggcaactttcatccttcgccgctgatgggaggctttggactgaaacacccgcctcctcagatcctgattaagaatacacctgttcccgcggatcctccaactaccttcagtcaagccaagctggcgtcgttcatcacgcagtacagcaccggacaggtcagcgtggaaattgaatgggagctgcagaaagagaacagcaagcgctggaacccagagattcagtatacttccaactactacaaatctacaaatgtggactttgctgtcaatactgagggtacttattcagagcctcgccccattggcacccgttacctcacccgtaacctgtaattgcctgttaatcaataaaccggttaattcgtttcagttgaactttggtctctgcgaagggcgaattc

SEQ ID NO: 4972 - protein, 738 aa, Adeno-associated virus; identical to SEQ ID NO: 4965

SEQ ID NO: 4973 - DNA, 1933 bp, Adeno-associated virus
  source 1..1933: mol_type = genomic DNA
caaggcctacgaccagcagctcaaagcgggtgacaatccgtacctgcggtataaccacgccgacgccgagtttcaggagcgtcttcaagaagatacgtcttttgggggcaacctcgggcgagcagtcttccaggccaaaaagcgggttctcgaacctcttggtctggttgagacgccagctaagacggcacctggaaagaagcgaccggtagactcgccagactccacctcgggcatcggcaagaaaggccagcagcccgcgaaaaagagactcaactttgggcagactggcgactcagagtcagtccccgaccctcaaccaatcggagaaccaccagcaggcccctctggtctgggatctggtacaatggctgcaggcggtggcgcaccaatggctgacaataacgagggcgccgacggagtgggtaatgcctcaggaaattggcattgcgattccacatggctgggcgacagagtcatcaccaccagcacccgaacctgggccctgcccacctacaacaaccacctctacaagcaaatctccagtcagtcagcagggagcaccaacgataacgtctatttcggctacagcaccccctgggggtattttgacttcaacagattccattgccacttctcaccacgtgactggcagcgacttatcaacaacaactggggattccggcccaagaagctcaacttcaagctcttcaacatccaggtcaaggaggtcacgacgaatgacggtgtcacaaccatcgctaataaccttaccagcacggttcaggtcttttcggactcggaatatcaactgccgtacgtcctcggctccgcgcaccagggctgcctgcctccgttcccggcagacgtgttcatgattccgcagtacggatacctgactctgaacaatggcagccaatcggtaggccgttcctccttctactgcctggagtactttccttctcagatgctgagaacgggcaacaacttcacctttagctacaccttcgaggacgtgcctttccacagcagctacgcgcacagccagagtctggaccggctgatgaatcccctcatcgaccagtacctgtactacttggccagaacacagagcaacgcaggaggtactgctggcaatcgggaactgcagttttatcagggcggacctaccaccatggccgaacaagcaaagaactggctgcccggaccttgcttccggcaacagagagtatccaagacgctggatcaaaataacaacagcaactttgcctggactggtgccacaaaataccatttaaatgnaagaaattcattggttaatcccggtgtcgccatggcaacccacaaggacgacgaggaacgcttcttcccttcgagcggagttctaatttttggcaaaactggagcagctaataaaactacattagaaaacgtgctcatgacaaatgaagaagaaattcgtcctaccaacccggtagctaccgaggaatacgggattgtaagcagcaacttgcaggcggctagcaccgcagcccagacacaagttgttaacaaccagggagccttacctggcatggtctggcagaaccgggacgtgtacctgcaaggtcccatttgggccaagattcctcacacggacggcaactttcacccgtctcctctaatgggtggctttggactgaaacacccgcctccccagatcctgatcaaaaacacaccggtacctgctaatcctccagaagtgtttactcctgccaagtttgcttccttcatcacgcagtacagcaccgggcaagtcagcgttgagatcgagtgggagctgcagaaagagaacagcaagcgctggaacccagagattcagtacacctccaactttgacaaacagactggagtggactttgctgttgacagccagggtgtttactctgagcct

SEQ ID NO: 4974 - DNA, 3105 bp, Adeno-associated virus
  source 1..3105: mol_type = genomic DNA
gaattcgcccttgctgcgtcaactggaccaatgagaactttcccttcaacgattgcgtcgacaagatggtgatctggtgggaggagggcaagatgaccgccaaggtcgtggagtccgccaaggccattctgggcggaagcaaggtgcgcgtggaccaaaagtgcaagtcatcggcccagatcgaccccacgcccgtgatcgtcacctccaacaccaacatgtgcgccgtgatcgacgggaacagcaccaccttcgagcaccagcagccgctgcaggaccgcatgttcaagttcgagctcacccgccgtctggagcacgactttggcaaggtgaccaagcaggaagtcaaagagttcttccgctgggctcaggatcacgtgactgaggtggcgcatgagttctacgtcagaaagggcggagccaccaaaagacccgcccccagtgacgcggatataagcgagcccaagcgggcctgcccctcagttgcggagccatcgacgtcagacgcggaagcaccggtggactttgcggacaggtaccaaaacaaatgttctcgtcacgcgggcatgcttcagatgctgtttccctgcaagacatgcgagagaatgaatcagaatttcaacgtctgcttcacgcacggggtcagagactgctcagagtgcttccccggcgcgtcagaatctcaacccgtcgtcagaaaaaagacgtatcagaaactgtgcgcgattcatcatctgctggggcgggcacccgagattgcgtgttcggcccgcgatctcgtcaacgtggacttggatgactgtgtttctgagcaataaatgacttaaaccaggtatggctgctgacggttatcttccagattggctcgaggacaacctctctgagggcattcgcgagtggtgggacctgaaacctggagcccccaagcccaaggccaaccagcagaagcaggacgacggccggggtctggtgcttcctggctacaagtacctcggacccttcaacggactcgacaagggggagcccgtcaacgcggcggacgcagcggccctcgagcacgacaaggcctacgaccagcagctcaaagcgggtgacaatccgtacctgcggtataaccacgccgacgccgagtttcaggagcgtctgcaagaagatacgtcttttgggggcaacctcgggcgagcagtcttccaggccaagaagagggtactcgaacctctgggcctggttgaagaaggtgctaagacggctcctggaaagaagagaccgttagagtcaccacaagagcccgactcctcctcaggaatcggcaaaaaaggcaaacaaccagccaaaaagagactcaactttgaagaggacactggagccggagacggaccccctgaaggatcagataccagcgccatgtcttcagacattgaaatgcgtgcagcaccgggcggaaatgctgtcgatgcgggacaaggttccgatggagtgggtaatgcctcgggtgattggcattgcgattccacctggtctgagggcaaggtcacaacaacctcgaccagaacctgggtcttgcccacctacaacaaccacttgtacctgcggctcggaacaacatcaaacagcaacacctacaacggattctccaccccctggggatactttgactttaacagattccactgtcacttctcaccacgtgactggcaaagactcatcaacaacaactggggactacgaccaaaagccatgcgcgttaaaatcttcaatatccaagttaaggaggtcacaacgtcgaacggcgagactacggtcgctaataaccttaccagcacggttcagatatttgcggactcgtcgtatgagctcccgtacgtgatggacgctggacaagagggaagtctgtctcctttccccaatgacgtcttcatggtgcctcaatatggctactgtggcattgtgactggcgaaaatcagaaccagacggacagaaatgctttctactgcctggagtattttccttcacaaatgctgagaactggcaataactttgaaatggcttacaactttgggaaggtgccgttccactcaatgtatgcttacagccagagcccggacagactgatgaatcccctcctggaccagtacctgtggcacttacagtcgaccacctctggagagactctgaatcaaggcaatgcagcaaccacatttggaaaaatcaggagtggagactttgccttttacagaaagaactggctgcctgggccttgtgttaaacagcagagactctcaaaaactgccagtcaaaattacaagattcctgccagcgggggcaacgctctgttaaagtatgacacccactataccttaaacaaccgctggagcaacatagcgcctggacctccaatggcaacagctggaccttcagatggggacttcagcaacgcccagctcatcttccctggaccatcagtcaccggaaacacaacaacctcagcaaacaatctgttgtttacatcagaagaagaaattgctgccaccaacccaagagacacggacatgtttggtcagattgctgacaataatcagaatgctacaactgctcccataaccggcaacgtgactgctatgggagtgcttcctggcatggtgtggcaaaacagagacatttactaccaagggccaatttgggccaagatcccacacgcggacggacattttcatccttcaccgctaattggcggttttggactgaaacatccgcctccccagatatttatcaaaaacacccccgtacctgccaatcctgcgacaaccttcactgcagccagagtggactctttcatcacacaatacagcaccggccaggtcgctgttcagattgaatgggaaatcgaaaaggaacgctccaaacgctggaatcctgaagtgcagtttacttcaaactatgggaaccagtcttctatgttgtgggctcccgatacaactgggaagtatacagagccgcgggttattggctctcgttatttgactaatcatttgtaactgcctagttaatcaataaaccgtgtgattcgtttcagttgaactttggtctctgcgaagggcgaattc

SEQ ID NO: 4975 - protein, 733 aa, Adeno-associated virus
MAADGYLPDWLEDNLSEGIREWWDLKPGAPKPKANQQKQDDGRGLVLPGYKYLGPFNGLDKGEPVNAADAAALEHDKAYDQQLKAGDNPYLRYNHADAEFQERLQEDTSFGGNLGRAVFQAKKRVLEPLGLVEEGAKTAPGKKRPLESPQEPDSSSGIGKKGKQPAKKRLNFEEDTGAGDGPPEGSDTSAMSSDIEMRAAPGGNAVDAGQGSDGVGNASGDWHCDSTWSEGKVTTTSTRTWVLPTYNNHLYLRLGTTSNSNTYNGFSTPWGYFDFNRFHCHFSPRDWQRLINNNWGLRPKAMRVKIFNIQVKEVTTSNGETTVANNLTSTVQIFADSSYELPYVMDAGQEGSLPPFPNDVFMVPQYGYCGIVTGENQNQTDRNAFYCLEYFPSQMLRTGNNFEMAYNFEKVPFHSMYAHSQSLDRLMNPLLDQYLWHLQSTTSGETLNQGNAATTFGKIRSGDFAFYRKNWLPGPCVKQQRFSKTASQNYKIPASGGNALLKYDTHYTLNNRWSNIAPGPPMATAGPSDGDFSNAQLIFPGPSVTGNTTTSANNLLFTSEEEIAATNPRDTDMFGQIADNNQNATTAPITGNVTAMGVLPGMVWQNRDIYYQGPIWAKIPHADGHFHPSPLIGGFGLKHPPPQIFIKNTPVPANPATTFTAARVDSFITQYSTGQVAVQIEWEIEKERSKRWNPEVQFTSNYGNQSSMLWAPDTTGKYTEPRVIGSRYLTNHL

SEQ ID NO: 4976 - DNA, 3105 bp, Adeno-associated virus
  source 1..3105: mol_type = genomic DNA
gaattcgcccttgctgcgtcaactggaccaatgagaactttcccttcaacgattgcgtcgacaagatggtgatctggtgggaggagggcaagatgaccgccaaggtcgtggagtccgccaaggccattctgggcggaagcaaggtgcgcgtggaccaaaagtgcaagtcatcggcccagatcgaccccacgcccgtgatcgtcacctccaacaccaacatgtgcgccgtgatcgacgggaacagcaccaccttcgagcaccagcagccgctgcaggaccgcatgttcaagttcgagctcacccgccgtctggagcacgactttggcaaggtgaccaagcaggaagtcaaagagttcttccgctgggctcaggatcacgtgactgaggtggcgcatgagttctacgtcagaaagggcggagccaccaaaagacccgcccccagtgacgcggatataagcgagcccaagcgggcctgcccctcagttgcggagccatcgacgtcagacgcggaagcaccggtggactttgcggacaggtaccaaaacaaatgttctcgtcacgcgggcatgcttcagatgctgtttccctgcaagacatgcgagagaatgaatcagaatttcaacgtctgcttcacgcacggggtcagagactgctcagagtgcttccccggcgcgtcagaatctcaacccgtcgtcagaaaaaagacgtatcagaaactgtgcgcgattcatcatctgctggggcgggcacccgagattgcgtgttcggcctgcgatctcgtcaacgtggacttggatgactgtgtttctgagcaataaatgacttaaaccaggtatggctgctgacggttatcttccagattggctcgaggacaacctctctgagggcattcgcgagtggtgggacctgaaacctggagcccccaagctcaaggccaaccagcagaagcaggacgacggccggggtctggtgcttcctggctacaagtacctcggacccttccacggactcgacaagggggagcccgtcaacgcggcggacgcagcggccctcgagcacgacaaggcctacgaccagcagctcaaagcgggtgacaatccgtacctgcggtataaccacgccgacgccgagtttcaggagcgtctgcaagaagatacgtcttttgggggcaacctcgggcgagcagtcttccaggccaagaagagggtactcgaaccactgggcctggttgaagaaggtgctaagacggctcctggaaagaagagaccgttagagtcaccacaagagcccgactcctcctcaggaatcggcaaaaaaggcaaacaaccagccaaaaagagactcaactttgaagaggacactggagccggagacggaccccctgaaggatcagataccagcgccatgtcttcagacattgaaatgcgtgcagcaccgggcggaaatgctgtcgatgcgggacaaggttccgatggagtgggtaatgcctcgggtgattggcattgcgattccacctggtctgagggcaaggtcacaacaacctcgaccagaacctgggtcttgcccacctacaacaaccacttgtacctgcggctcggaacaacatcaaacagcaacacctacaacggattctccaccccctggggatactttgactttaacagattccactgtcacttctcaccacgtgactggcaaagactcatcaacaacaactggggactacgaccaaaagccatgcgcgttaaaatcttcaatatccaagttaaggaggtcacaacgtcgaacggcgagactacggtcgctaataaccttaccagcacggttcagatatttgcggactcgtcgtatgagctcccgtacgtgatggacgctggacaagagggaagtctgcctcctttccccaatgacgtcttcatggtgcctcaatatggctactgtggcattgtgactggcgaaaatcagaaccagacggacagaaatgctttctactgcctggagtattttccttcacaaatgctgagaactggcaataactttgaaatggcttacaactttgagaaggtgccgttccactcaatgtatgctcacagccagagcctggacagactgatgaatcccctcctggaccagtacctgtggcacttacagtcgaccacctctggagagactctgaatcaaggcaatgcagcaaccacatttggaaaaatcaggagtggagactttgccttttacagaaagaactggctgcctgggccttgtgttaaacagcagagattctcaaaaactgccagtcaaaattacaagattcctgccagcgggggcaacgctctgttaaagtatgacacccactataccttaaacaaccgctggagcaacatagcgcctggacctccaatggcaacagctggaccttcagatggggacttcagcaacgcccagctcatcttccctggaccatcagtcaccggaaacacaacaacctcagcaaacaatctgttgtttacatcagaaggagaaattgctgccaccaacccaagagacacggacatgtttggtcagattgctgacaataatcagaatgctacaactgctcccataaccggcaacgtgactgctatgggagtgcttcctggcatggtgtggcaaaacagagacatttactaccaagggccaatttgggccaagatcccacacgcggacggacattttcatccttcaccgctaattggcggttttggactgaaacatccgcctccccagatatttatcaaaaacacccccgtacctgccaatcctgcgacaaccttcactgcagccagagtggactctttcatcacacaatacagcaccggccaggtcgctgttcagattgaatgggaaatcgaaaaggaacgctccaaacgccggaatcctgaagtgcagtttacttcaaactatgggaaccagtcttctatgttgtgggctcccgatacaactgggaagtatacagagccgcgggttattggctctcgttatttgactaatcatttgtaactgcctagttaatcaataaaccgtgtgattcgtttcagttgaactttggtctctgcgaagggcgaattc

SEQ ID NO: 4977 - DNA, 3105 bp, Adeno-associated virus
  source 1..3105: mol_type = genomic DNA
gaattcgcccttcgcagagaccaaagttcaactgaaacgaatcacacggtttattgattaactaggcagttacaaatgattagtcaaataacgagagccaataacccgcggctctgtatacttcccagttgtatcgggagcccacaacatagaagactggttcccacagtttgaagtaaactgcacttcaggattccagcgtttggagcgttccttttcgatttcccattcaatctgaacagcgacctggccggtgctgtattgtgtgatgaaagagtccactctggctgcagtgaaggttgtcgcaggataggcaggtacgggggtgtttttgataaatatctggggaggcggatgtttcagtccaaaaccgccaattagcggtgaaggatgaaaatgtccgtccgcgtgtgggatcttggcccaaattggcccttggtagtaaatgtctctgttttgccacaccatgccaggaagcactcccatagcagtcacgttgccggttatgggagcagttgtagcattctgattattgtcagcaatctgaccaaacatgtccgtgtctcttgggttggtggcagcaatttcttcttctgatgtaaacaacagattgtttgctgaggttgttgtgtttccggtgactgatggtccagggaagatgagctgggcgttgctgaagtccccatctgaaggtccagctgttgccattggaggtccaggcgctatgttgctccagcggttgtttaaggtatagtgggtgtcatactttaacagagcgttgcccccgctggcaggaatcttgtaattttgactggcagtttttgagaatctctgctgtttaacacaaggcccaggcagccagttctttctgtaaaaggcaaagtctccactcctgatttttccaaatgtggttgctgcattgccttgattcagagtctctccagaggtggtcgactgtaagtgccacaggtactggtccaggaggggattcatcagtccgtccaggctctggctgtgagcatacattgagtggaacggcaccttctcaaagttgtaagccgtttcaaagttattgccagttctcagcatttgtgaaggaaaatactccaggcagtagaaagcatttctgtccgtctggttctgattttcgccagtcacaatgccacagtagccatattgaggcaccatgaagacgtcattggggaaaggaggcagacttccctcttgtccagcgtccatcacgtacgggagctcatacgacgagtccgcaaatatctgaaccgtgctggtaaggttattagcgaccgtagtctcgccgttcgacgttgtgacctccttaacttggatattgaagattttaacgcgcatggcttttggtcgtagtccccagttgttgttgatgagtctttgccagtcacgtggtgagaagtgacagtggaatctgttaaagtcaaagtatccccagggggtggagaatccgttgtaggtgttgctgtttgatgttgttccgagccgcaggtacaagtggttgttgtaggtgggcaagacccaggttctggtcgaggttgttgtgaccttgccctcagaccaggtggaatcgcaatgccaatcacccgaggcattacccactccatcggaaccttgtcccgcatcgacagcatttccgcccggtgctgcacgcatttcaatgtctgaagacatggcgctggtatctgatccttcagggggtccgtctccggctccagtgtcctcttcaaagttgagtctctttttggctggttgtttgccttttttgccgattcctgaggaggagtcgggctcttgtggtgactctaacggtctcttctttccaggagccgtcttagcaccttcttcaaccaggcccagaggttcgagtaccctcttcttggcctggaagactgctcgcccgaggttgcccccaaaagacgtatcttcttgcagacgctcctgaaactcggcgtcggcgtggttataccgcaggtacggattgtcacccgctttgagctgctggtcgtaggccttgtcgtgctcgagggccgctgcgtccgccgcgttgacgggctcccccttgtcgagtccgttgaagggtccgaggtactcgtagccaggaagcaccagaccccggccgtcgtcctgcttctgctggttggccttgggcttgggggctccaggtttcaggtcccaccactcgcgaatgccctcagagaggttgtcctcgagccaatctggaagataaccgtcagcagccatacctggtttaagtcatttattgctcagaaacacagtcatccaagtccacgttgacgagatcgcaggccgaacacgcaatctcgggtgcccgccccagcagatgatgaatcgcgcacagtttctgatacgtcttttttctgacgacgggttgagattctgacgcgccggggaagcactctgagcagtctctgaccccgtgcgtgaagcagacgttgaaattctgattcattctctcgcatgtcttgcagggaaacagcatctgaagcatgcccgcgtgacgagaacatttgttttggtacctgtccgcaaggtccaccggtgcttccgcgtctgacgtcgatggctccgcaactgaggggcaggcccgcttgggctcgcttatatccgcgtcactgggggcgggtcttttggtggctccgccctttctgacgtagaactcatgcgccacctcagtcacgtgatcctgagcccagcggaagaactctttgacttcctgcttggtcaccttgccaaagtcgtgctccagacggcgggtgagctcgaacttgaacatgcggtcctgcagcggctgctggtgctcgaaggtggtgctgttcccgtcgatcacggcgcacatgttggtgttggaggtgacgatcacgggcgtggggtcgatctgggccgatgacttgcacttttggtccacgcgcaccttgcttccgcccagaatggccttggcggactccacgaccttggcggtcatcttgccctcctcccaccagatcaccatcttgtcgacgcaatcgttgaagggaaagttctcattggtccagttgacgcagcaagggcgaattc

SEQ ID NO: 4978 - DNA, 3094 bp, Adeno-associated virus
  source 1..3094: mol_type = genomic DNA
gaattcgcccttgctgcgtcaactggaccaagagaactttcccttcaacgattgcgtcgacaagatggtgatctggtgggaggagggcaagatgacggccaaggtcgtggagtccgccaaagccattctgggcggaagcaaggtgcgcgtcgaccaaaagtgcaagtcctcggcccagatcgatcccacccccgtgatcgtcacctccaacaccaacatgtgcgccgtgatcgacgggaacagcaccaccttcgagcaccagcagccgttgcaggaccggatgttcaaatttgaactcacccgccgtctggaacacgactttggcaaggtgaccaagcaggaagtcaaagagttcttccgctgggctagtgatcacgtgactgaggtgacgcatgagttctacgtcagaaagggcggagccagcaaaagacccgcccccgatgacgcggatataagcgagcccaagcgggcctgtccctcagtcacggacccatcgacgtcagacgcggaaggagctccggtggactttgccgacaggtaccaaaacaaatgttctcgtcacgcgggcatgcttcagatgctgtttccctgcaaaacgtgcgagagaatgaatcagaatttcaacatttgcttcacgcacggggtcagagactgtttagaatgtttccccggcgtgtcagaatctcaaccggtcgtcagaaaaaagacgtatcggaagctgtgtgcgattcatcatctgctggggcgggcacccgagattgcttgctcggcctgcgacctggtcaacgtggacctggacgactgtgtttctgagcaataaatgacttaaaccgggtatggctgccgatggttatcttccagattggctcgaggacaacctctctgagggcattcgcgagtggtgggacctgaaacctggagccccgaaacccaaagccaaccagcaaaagcaggacgacggccggggtctggtgcttcctggctacaagtacctcggacccttcaacggactcgacaagggggagcccgtcaacgcggcggacgcagcggccctcgagcacgacaaggcctacgaccagcagctcaaagcgggtgacaatccgtacctgcggtataaccacgccgacgccgagtttcaggagcgtctgcaagaagatacgtcatttgggggcaacctcgggcgagcagtcttccaggccaagaagcgggttctcgaacctctcggtctggttgaggaaggcgctaagacggctcctggaaagaagagacccatagactctccagactcctccacgggcatcggcaaaaaaggccagcagcccgctaaaaagaagctcaattttggtcagactggcgactcagagtcagtccccgaccctcaacctcttggagaacctccagcagcgccctctagtgtgggatctggtacaatggctgcaggcggtggcgcaccaatggcagacaataacgaaggtgccgacggagtgggtaatgcctcaggaaattggcattgcgattccacatggctgggcgacagagtcatcaccaccagcaccagaacctgggccctccccacctacaacaaccacctctacaagcaaatctccagcagcagctcaggagccaccaatgacaaccactacttcggctacagcaccccctgggggtattttgactttaacagattccactgccacttctcaccacgtgactggcagcgactcatcaacaacaactggggattccggcccaagaagctgcggttcaagctcttcaacatccaggtcaaggaggtcacaacgaatgacggcgtcacgaccatcgctaataaccttaccagcacggttcaggtcttctcggactcggaataccagctgccgtacgtcctcggctctgcgcaccagggctgcctgcctccgttcccggcggacgtcttcatgattcctcagtacggctacctgactctgaacaacggcagccaatcggtgggccgttcctccttctactgcctggaatatttcccctctcaaatgctgagaacgggcaacaactttgagttcagttacagcttcgaggacgtgcctttccacagcagctacgcgcacagccagagcctagaccggctgatgaaccctctcatcgaccagtacctgtactacctggcccggacccagagcaccacgggttccaccagggaactgcaatttcatcaagctgggcccaatactatggccgagcagtcaaagaactggctgcctggaccctgctataggcaacagggactgtcaaagaacttggactttaacaacaacagcaattttgcctggactgctgccactaaatatcatctgaatggcagaaactctttgaccaatcctggcattcccatggcaaccaacaaggatgatgaggaccagttctttcccatcaacggggtactggtttttggcaagacgggagctgccaacaaaactacgctggaaaacgttctgatgaccagcgaggaggagatcaagaccactaaccctgtggctacagaagaatacggtgtggtctccagcaacctgcagccgtctacagccgggcctcaatcacagactatcaacagccagggagcactgcctggcatggtctggcagaaccgggacgtgtatctgcagggtcccatctgggccaaaattcctcacacggatggcaactttcacccgtctcctctgatgggcggttttggactcaaacacccgcctccacagatcctgatcaaaaacacacctgtacctgctaatcctccggaggtgtttactcctgccaagtttgcctccttcatcacgcagtacagcaccggacaagtcagcgtggaaatcgagtgggagctgcagaaagaaaacagcaagcgctggaacccagaaattcagtatacttccaattatgccaagtctaataatgttgaatttgctgtgaaccctgatggtgtttatactgagcctcgccccattggcactcgttacctcccccgtaatctgtaattgcttgttaatcaataaaccggttgattcgtttcagttgaactttggtctctgcgaagggcgaattc

SEQ ID NO: 4979 - DNA, 3095 bp, Adeno-associated virus
  source 1..3095: mol_type = genomic DNA
gaattcgcccttcgcagagaccaaagttcaactgaaacgaatcaaccggtttattgattaacaagcaattacagattacgggtgaggtaacgagtgccaatggggcgaggctcagtataaacaccatcagggttcacagcaaattcaacattattagacttggcataattggaagtatactgaatttctgggttccagcgcttgctgttttctttctgcagctcccactcgatttccacgctgacttgtccggtgctgtactgcgtgatgaaggaggcaaacttggcaggagtaaacacctccggaggattagcaggtacaggtgtgtttttgatcaggatctgtggaggcgggtgtttgagtccaaaaccgcccatcagaggagacgggtgaaagttgccatccgtgtgaggaattttggcccagatgggaccctgcagatacacgtcccggttctgccagaccatgccaggcagtgctccctggctgttgatagtctgtgattgaggcccggctgtagacgactgcaggttgctggagaccacaccgtattcttctgtagccacagggttagtggtcttgatctcctcctcgctggtcatcagaacgttttccagcgtagttttgttggcagctcccgtcttgccaaaaaccagtaccccgttgatgggaaagaactggtcctcatcatccttgttggttgccatgggaatgccaggattggtcaaagagtttctgccattcagatgatatttagtggcagcagtccaggcaaaattgctgttgttgttaaagtccaagttctttgacagtctctgttgcctatagcagggtccaggcagccagttctttgactgctcggccatagtattgggcccagcttgatgaaattgcagttccctggtggaacccgtggtgctctgggtccgggccaggtagtacaggtactggtcgatgagagggttcatcagccggtctaggctctggctgtgcgcgtagctgctgtggaaaggcacgtcctcgaagctgtaactgaactcaaagttgttgcccgttctcagcatttgagaggggaaatattccaggcagtagaaggaggaacggcccaccgattggctgccgttgtccagagtcaggtagccgtactgaggaatcatgaagacgtccgccgggaacggaggcaggcagccctggtgcgcagagccgaggacgtacggcagctggtattccgagtccgagaagacctgaaccgtgctggtaaggttattagcgatggtcgtgacgccgtcattcgttgtgacctccttgacctggatgttgaggagcttgaaccgcagcttcttgggccggaatccccagttgttgttgatgagtcgctgccagtcacgtggtgagaagtggcagtggaatctgttaaagtcaaaatacccccagggggtgctgtagccgaagtagtggttgtcattggtggctcctgagctgctgctggagatttgcttgtagaggtggttgttgtaggtggggagggcccaggttctggtgctggtggtgatgactctgtcgcccagccatgtggaatcgcaatgccaatttcctgaggcattacccactccgtcggcaccttcgttattgtctgccattggtgcgccaccgcctgcagccattgtaccagatcccacactagagggcgctgctggaggttctccaagaggttgagggtcggggactgactctgagtcgccagtctgaccaaaattgagcttctttttagcgggctgctggccttttttgccgatgcccgtggaggagtctggagagcctatgggtctcttctttccaggagccgtcttagcgccttcctcaaccagaccgagaggttcgagaacccgcttcttggcctggaagactgctcgcccgaggttgcccccaaatgacgtatcttcttgcagacgctcctgaaactcggcgtcggcgtggttataccgcaggtacggattgtcacccgctttgagctgctggtcgtaggccttgtcgtgctcgagggccgctgcgtccgccgcgttgacgggctcccccttgtcgagtccgttgaagggtccgaggtacttgtagccaggaagcaccagaccccggccgtcgtcctgcttttgctggttggctttgggtttcggggctccaggtttcaggtcccaccactcgcgaatgccctcagagaggttgtcctcgagccaatctggaagataaccatcggcagccatacctggtttaagtcatttattgctcagaaacacagtcgtccaggtccacgttgaccaggtcgcaggccgagcaagcaatctcgggtgcccgccccagcagatgatgaatcgcacacagcttccgatacgtcttttttctgacgaccggttgagattctgacacgccggggaaacattctaaacagtctctgaccccgtgcgtgaagcaaatgttgaaattctgattcattctctcgcacgttttgcagggaaacagcacctgaagcatgcccgcgtgacgagaacatttgttttggtacctgtcggcaaagtccaccggagctccttccgcgtctgacgtcgatgggtccgtgactgagggacgggcccgcttgggctcgcttatatccgcgtcatcgggggcgggtcttttgctggctccgccctttctgacgtagaactcatgcgtcacctcagtcacgtgatcactagcccagcggaagaactctttgacttcctgctttgtcaccttgccaaagtcgtgttccagacggcgggtgagttcaaatttgaacatccggtcctgcaacggttgctggtgctcgaaggtggtgctgttcccgtcgatcacggcgcacatgttggtgttggaggtgacgatcacgggggtgggatcgatctgggcggacgacttgcacttttggtccacgcgcaccttgctgccgccgagaatggccttggcggactccacgaccttggccgtcatcttgccctcctcccaccagatcaccatcttgtcgacgcaatcgttgaagggaaagttctcattggtccagttgacgcagcaagggcgaattc

SEQ ID NO: 4980 - DNA, 3095 bp, Adeno-associated virus
  source 1..3095: mol_type = genomic DNA
gaattcgcccttcgcagagaccaaagttcaactgaaacgaatcaaccggtttattgattaacaagcaattacagattacgggtgaggtaacgagtgccaatggggcgaggctcagtataaacaccatcagggttcacagcaaattcaacattattagacttggcataattggaagtatactgaatttctgggttccagcgcttgctgttttctttctgcagctcccactcgatttccacgctgacttgtccggtgctgtactgcgtgatgaaggaggcaaacttggcaggagtaaacacctccggaggattagcaggtacaggtgtgtttttgatcaggatctgtggaggcgggtgttcgagtccaaaaccgcccatcagaggagacgggtgaaagttgccatccgtgtgaggaattttggcccagatgggaccctgcagatacacgtcccggttctgccagaccatgccaggcagtgctccctggctgttgatagtctgtgattgaggcccggctgtagacgactgcaggttgctggagaccacaccgtattcttctgtagccacagggttagtggtcttgatctcctcctcgctggtcatcagaacgttttccagcgtagttttgttggcagctcccgtcttgccaaaaaccagtaccccgttgatgggaaagaactggtcctcatcatccttgttggttgccatgggaatgccaggattggtcaaagagtttctgccattcagatgatatttagtggcagcagtccaggcaaaattgctgttgttgttaaagtccaagttctttgacagtctctgttgcctatagcagggtccaggcagccagttctttgactgctcggccatagtattgggcccagcttgatgaaattgcagttccctggtggaacccgtggtgctctgggtccgggccaggtagtacaggtactggtcgatgagagggttcatcagccggtctaggctctggctgtgcgcgtagctgctgtggaaaggcacgtcctcgaagctgtaactgaactcaaagttgttgcccgttctcagcatttgagaggggaaatattccaggcagtagaaggaggaacggcccaccgattggctgccgttgttcagagtcaggtagccgtactgaggaatcatgaagacgtccgccgggaacggaggcaggcagccctggtgcgcagagccgaggacgtacggcagctggtattccgagtccgagaagacctgaaccgtgctggtaaggttattagcgatggtcgtgacgccgtcattcgttgtgacctccttgacctggatgttgaagagcttgaaccgcagcttcttgggccggaatccccagttgttgttgatgagtcgctgccagtcacgtggtgagaagtggcagtggaatctgttaaagtcaaaatacccccagggggtgctgtagccgaagtagtggttgtcattggtggctcctgagctgctgctggagatttgcttgtagaggtggttgttgtaggtggggagggcccaggttctggtgctggtggtgatgactctgtcgcccagccatgtggaatcgcaatgccaatttcctgaggcattacccactccgtcggcaccttcgttattgtctgccgttggtgcgccaccgcctgcagccattgtaccagatcccacactagagggcgctgctggaggttctccaagaggttgagggtcggggactgactctgagtcgccagtctgaccaaaattgagcttctttttagcgggctgctggccttttttgccgatgcccgtggaggagtctggagagtctatgggtctcttctttccaggagccgtcttagcgccttcctcaaccagaccgagaggttcgagaacccgcttcttggcctggaagactgctcgcccgaggttgcccccaaatgacgtatcttcttgcaggcgctcctgaaactcggcgtcggcgtggttataccgcaggtacggattgtcacccgctttgagctgctggtcgtaggccttgtcgtgctcgagggccgctgcgtccgccgcgttgacgggctcccccttgtcgagtccgttgaagggtccgaggtacttgtagccaggaagcaccagaccccggccgtcgtcctgcttttgctggttggctttgggtttcggggctccaggtttcaggtcccaccactcgcgaatgccctcagagaggttgtcctcgagccaatctggaagataaccatcggcagccatacctggtttaagccatttattgctcagaaacacagtcgtccaggtccacgttgaccaggtcgcaggccgagcaggcaatctcgggtgcccgccccagcagatgatgaatcgcacacagcttccgatacgtcttttttctgacgaccggttgagattctgacacgccggggaaacattctaaacagtctctgaccccgtgcgtgaagcaaatgttgaaattctgattcattctctcgcacgttttgcagggaaacagcatctgaagcatgcccgcgtggcgagaacatttgttttggtacctgtcggcaaagtccaccggagctccttccgcgtctgacgtcgatgggtccgtgactgagggacaggcccgcttgggctcgcttatatccgcgtcatcgggggcgggtcttttgctggctccgccctttctgacgtagaactcatgcgtcacctcagtcacgtgatcactagcccagcggaagaactctttgacttcctgctttgtcaccttgccaaagtcgtgttccagacggcgggtgagttcaaatttgaacatccggtcctgcaacggctgctggtgctcgaaggtggtgctgttcccgtcgatcacggcgcgcatgttggtgttggaggtgacgatcacgggggtgggatcgatctgggcggacgacttgcacttttggtccacgcgcaccttgctgccgccgagaatggccttggcggactccacgaccttggccgtcatcttgccctcctcccaccagatcaccatcttgtcgacgcaatcgttgaagggaaagttctcattggtccagttgacgcagcaagggcgaattc

SEQ ID NO: 4981 - protein, 729 aa, Adeno-associated virus; identical to SEQ ID NO: 4796

SEQ ID NO: 4982 - protein, 729 aa, Adeno-associated virus
MAADGYLPDWLEDNLSEGIREWWDLKPGAPKPKANQQKQDDGRGLVLPGYKYLGPFNGLDKGEPVNAADAAALEHDKAYDQQLKAGDNPYLRYNHADAEFQERLQEDTSFGGNLGRAVFQAKKRVLEPLGLVEEGAKTAPGKKRPIDSPDSSTGIGKKGQQPAKKKLNFGQTGDSESVPDPQPLGEPPAAPSSVGSGTMAAGGGAPTADNNEGADGVGNASGNWHCDSTWLGDRVITTSTRTWALPTYNNHLYKQISSSSSGATNDNHYFGYSTPWGYFDFNRFHCHFSPRDWQRLINNNWGFRPKKLRFKLFNIQVKEVTTNDGVTTIANNLTSTVQVFSDSEYQLPYVLGSAHQGCLPPFPADVFMIPQYGYLTLNNGSQSVGRSSFYCLEYFPSQMLRTGNNFEFSYSFEDVPFHSSYAHSQSLDRLMNPLIDQYLYYLARTQSTTGSTRELQFHQAGPNTMAEQSKNWLPGPCYRQQRLSKNLDFNNNSNFAWTAATKYHLNGRNSLTNPGIPMATNKDDEDQFFPINGVLVFGKTGAANKTTLENVLMTSEEEIKTTNPVATEEYGVVSSNLQSSTAGPQSQTINSQGALPGMVWQNRDVYLQGPIWAKIPHTDGNFHPSPLMGGFGLKHPPPQILIKNTPVPANPPEVFTPAKFASFITQYSTGQVSVEIEWELQKENSKRWNPEIQYTSNYAKSNNVEFAVNPDGVYTEPRPIGTRYLTRNL

SEQ ID NO: 4983 - protein, 729 aa, Adeno-associated virus
MAADGYLPDWLEDNLSEGIREWWDLKPGAPKPKANQQKQDDGRGLVLPGYKYLGPFNGLDKGEPVNAADAAALEHDKAYDQQLKAGDNPYLRYNHADAEFQERLQEDTSFGGNLGRAVFQAKKRVLEPLGLVEEGAKTAPGKKRPIDSPDSSTGIGKKGQQPAKKKLNFGQTGDSESVPDPQPLGEPPAAPSSVGSGTMAAGGGAPMADNNEGADGVGNASGNWHCDSTWLGDRVITTSTRTWALPTYNNHLYKQISSSSSGATNDNHYFGYSTPWGYFDFNRFHCHFSPRDWQRLINNNWGFRPKKLRFKLFNIQVKEVTTNDGVTTIANNLTSTVQVFSDSEYQLPYVLGSAHQGCLPPFPADVFMIPQYGYLTLNNGSQSVGRSSFYCLEYFPSQMLRTGNNFEFSYSFEDVPFHSSYAHSQSLDRLMNPLIDQYLYYLARTQSTTGSTRELQFHQAGPNTMAEQSKNWLPGPCYRQQRLSKNLDFNNNSNFAWTAATKYHLNGRNSLTNPGIPMATNKDDEDQFFPINGVLVFGKTGAANKTTLENVLMTSEEEIKTTNPVATEEYGVVSSNLQSSTAGPQSQTINSQGALPGMVWQNRDVYLQGPIWAKIPHTDGNFHPSPLMGGFGLKHPPPQILIKNTPVPANPPEVFTPAKFASFITQYSTGQVSVEIEWELQKENSKRWNPEIQYTSNYAKSNNVEFAVNPDGVYTEPRPIGTRYLTRNL

SEQ ID NO: 4984 - DNA, 2217 bp, Adeno-associated virus
  source 1..2217: mol_type = genomic DNA
atggctgctgacggttatcttccagattggctcgaggacaacctctctgagggcattcgcgagtggtgggacctgaaacctggagcccccaagcccaaggccaaccagcagaagcaggacgacggccggggtctggtgcttcctggctacaagtacctcggacccttcaacggactcgacaagggggagcccgtcaacgcggcggacgcagcggccctcgagcacgacaaggcctacgaccagcagctcaaagcgggtgacaatccgtacctgcggtataaccacgccgacgccgagtttcaggagcgtctacaagaagatacgtcttttgggggcaacctcgggcgagcagtcttccaggccaagaagcgggttctcgaacctctcggtctggttgaggaagctgctaagacggctcctggaaagaagagaccggtagaaccgtcacctcagcgttcccccgactcctccacgggcatcggcaagaaaggccagcggcccgctaaaaagagactgaactttggtcagactggcgactcagagtcagtccccgaccctcaaccaatcggagaaccaccagcaggcccctctggtctgggatctggtacaatggctgcaggcggtggcgctccaatggcagacaataacgaaggcgccgacggagtgggtagttcctcaggaaattggcattgcgattccacatggctgggcgacagagtcatcaccaccagcacccgaacctgggccctgcccacctacaacaaccacctctacaagcaaatatccaatgggacatcgggaggaagcaccaacgacaacacctacttcggctacagcaccccctgggggtattttgacttcaacagattccactgccacttctcaccacgtgactggcagcgactcatcaacaacaactggggattccggccaaaaagactcagcttcaagcccttcaacatccaggtcaaggaggtcacgcagaatgaaggcaccaagaccatcgccaataaccttaccagcacgattcaggtatttacggactcggaataccagctgccgtacgtcctcggctccgcgcaccagggctgcctgcctccgttcccggcggacgtcttcatgattccccagtacggctaccttacactgaacaatggaagtcaagccgtaggccgttcctccttctactgcctggaatattttccatctcaaatgctgcgaactggaaacaattttgaattcagctacaccttcgaggacgtgcctttccacagcagctacgcacacagccagagcttggaccgactgatgaatcctctcatcgaccagtacctgcactacttatccagaactcagtccacaggaggaactcaaggtacccagcaattgttattttctcaagctgggcctgcaaacatgtcggctcaggctaagaactggctacctggaccttgctaccggcagcagcgagtctctacgacactgtcgcaaaacaacaacagcaactttgcttggactggtgccaccaaatatcacctgaacggaagagactctttggtaaatcccggtgtcgccatggcaacccacaaggacgacgaggaacgcttcttcccgtcgagtggagtcctgatgtttggaaaacagggtgctggaagagacaatgtggactacagcagcgttatgctaaccagcgaagaagaaattaaaaccactaaccctgtagccacagaacaatacggtgtggtggctgacaacttgcagcaaaccaatacagggcctattgtgggaaatgtcaacagccaaggagccttacctggcatggtctggcagaaccgagacgtgtacctgcagggtcccatctgggccaagattcctcacacggacggcaacttccacccttcaccgctaatgggaggatttggactgaagcacccacctcctcagatcctgatcaagaacacgccggtacctgcggatcctccaacaacgttcagccaggcgaaattggcttccttcattacgcagtacagcaccggacaggtcagcgtggaaatcgagtgggagctgcagaaggagaacagcaaacgctggaacccagagattcagtacacttcaaactactacaaatctacaaatgtggactttgctgtcaatacagagggaacttattctgagcctcgccccattggtactcgctacctcacccgtaatctgtaa

SEQ ID NO: 4985 - protein, 738 aa, Adeno-associated virus
MAADGYLPDWLEDNLSEGIREWWDLKPGAPKPKANQQKQDDGRGLVLPGYKYLGPFNGLDKGEPVNAADAAALEHDKAYDQQLKAGDNPYLRYNHADAEFQERLQEDTSFGGNLGRAVFQAKKRVLEPLGLVEEAAKTAPGKKRPVEPSPQRSPDSSTGIGKKGQRPAKKRLNFGQTGDSESVPDPQPIGEPPAGPSGLGSGTMAAGGGAPMADNNEGADGVGSSSGNWHCDSTWLGDRVITTSTRTWALPTYNNHLYKQISNGTSGGSTNDNTYFGYSTPWGYFDFNRFHCHFSPRDWQRLINNNWGFRPKRLSFKPFNIQVKEVTQNEGTKTIANNLTSTIQVFTDSEYQLPYVLGSAHQGCLPPFPADVFMIPQYGYLTLNNGSQAVGRSSFYCLEYFPSQMLRTGNNFEFSYTFEDVPFHSSYAHSQSLDRLMNPLIDQYLHYLSRTQSTGGTQGTQQLLFSQAGPANMSAQAKNWLPGPCYRQQRVSTTLSQNNNSNFAWTGATKYHLNGRDSLVNPGVAMATHKDDEERFFPSSGVLMFGKQGAGRDNVDYSSVMLTSEEEIKTTNPVATEQYGVVADNLQQTNTGPIVGNVNSQGALPGMVWQNRDVYLQGPIWAKIPHTDGNFHPSPLMGGFGLKHPPPQILIKNTPVPADPPTTFSQAKLASFITQYSTGQVSVEIEWELQKENSKRWNPEIQYTSNYYKSTNVDFAVNTEGTYSEPRPIGTRYLTRNL

SEQ ID NO: 4986 - DNA, 2217 bp, Adeno-associated virus
  source 1..2217: mol_type = genomic DNA
atggctgctgacggttatcttccagattggctcgaggacaacctctctgagggcattcgcgagtggtgggacctgaaacctggagcccccaagcccaaggccaaccagcagaagcaggacgacggccggggtctggtgcttcctggctacaagtacctcggacccttcaacggactcgacaagggggagcccgtcaacgcggcggacgcagcggccctcgagcacgacaaggcctacgaccagcagctcaaagcgggtgacaatccgtacctgcggtataaccacgccgacgccgagtttcaggagcgtctgcaagaagatacgtcttttgggggcaacctcgggcgagcagtcttccaggccaagaagcgggttctcgaacctctcggtctggttgaggaagctgctaagacggctcctggaaagaagagaccggtagaaccgtcacctcagcgttcccccgactcctccacgggcatcggcaagaaaggccagcagcccgctaaaaagagactgaactttggtcagactggcgactcagagtcagtccccgaccctcaaccaatcggagaaccaccagcaggcccctctggtctgggatctggtacaatggctgcaggcggtggcgctccaatggcagacaataacgaaggcgccgacggagtgggtagttcctcaggaaattggcattgcgattccacatggctgggcgacagagtcatcaccaccagcacccgaacctgggccctgcccacctacaacaaccacctctacaagcaaatatccaatgggacatcgggaggaagcaccaacgacaacacctacttcggctacagcaccccctgggggtattttgacttcaacagattccactgccacttctcaccacgtgactggcagcgactcatcaacaacaactggggattccggccaaaaagactcagcttcaagctcttcaacatccaggtcaaggaggtcacgcagaatgaaggcaccaagaccatcgccaataaccttaccagcacgattcaggtatttacggactcggaataccagctgccgtacgtcctcggctccgcgcaccagggctgcctgcctccgttcccggcggacgtcttcatgattccccagtacggctaccttacactgaacaatggaagtcaagccgtaggccgttcctccttctactgcctggaatattttccatctcaaatgctgcgaactggaaacaattttgaattcagctacaccttcgaggacgtgcctttccacagcagctacgcacacagccagagcttggaccgactgatgaatcctctcatcgaccagtacctgtactacttatccagaactcagtccacaggaggaactcaaggtacccagcaattgttattttctcaagctgggcctgcaaacatgtcggctcaggctaagaactggctacctggaccttgctaccggcagcagcgagtctctacgacactgtcgcaaaacaacaacagcaactttgcttggactggtgccaccaaatatcacctgaacggaagagactctttggtaaatcccggtgtcgccatggcaacccacaaggacgacgaggaacgcttcttcccgtcgagtggagtcctgatgtttggaaaacagggtgctggaagagacaatgtggactacagcagcgttatgctaaccagcgaagaagaaattaaaaccactaaccctgtagccacagaacaatacggtgtggtggctgataacttgcagcaaaccaatacggggcctattgtgggaaatgtcaacagccaaggagccttacctggcatggtctggcagaaccgagacgtgtacctgcagggtcccatctgggccaagattcctcacacggacggcaacttccacccttcaccgctaatgggaggatttggactgaagcacccacctcctcagatcctgatcaagaacacgccggtacctgcggatcctccaacaacgttcagccaggcgaaattggcttccttcattacgcagtacagcaccggacaggtcagcgtggaaatcgagtgggagctgcagaaggagaacagcaaacgctggaacccagagattcagtacacttcaaactactacaaatctacaaatgtggactttgctgtcaatacagagggaacttattctgagcctcgccccattggtactcgttacctcacccgtaatctgtaa

SEQ ID NO: 4987 - protein, 738 aa, Adeno-associated virus; identical to SEQ ID NO: 4760

SEQ ID NO: 4988 - protein, 738 aa, Adeno-associated virus
MAADGYLPDWLEDNLSEGIREWWDLKPGAPKPKANQQKQDDGRGLVLPGYKYLGPFNGLDKGEPVNAADAAALEHDKAYDQQLKAGDNPYLRYNHADAEFQERLQEDTSFGGNLGRAVFQAKKRVLEPLGLVEEAAKTAPGKKRPVEPSPQRSPDSSTGIGKKGQQPAKKRLNFGQTGDSESVPDPQPIGEPPAGPSGLGSGTMAAGGGAPMADNNEGADGVGSSSGNWHCDSTWLGDRVITTSTRTWALPTYNNHLYKQISNGTSGGSTNDNTYFGYSTPWGYFDFNRFHCHFSPRDWQRLINNNWGFRPKRLSFKLFNIQVKEVTQDEGTKTIANNLTSTIQVFTDSEYQLPYVLGSAHQGCLPPFPADVFMIPQYGYLTLNNGSQAVGRSSFYCLEYFPSQMLRTGNNFEFSYTFEDVPFHSSYAHSQSLDRLMNPLIDQYLYYLSRTQSTGGTQGTQQLLFSQAGPANMSARAKNWLPGPCYRQQRVSTTLSQNNNSNFAWTGATKYHLNGRDSLVNPGVAMATHKDDEERFFPSSGVLMFGKQGAGRDNVDYSSVMLTSEEEIKTTNPVATEQYGVVADNLQQANTGPIVGNVNSQGALPGMVWQNRDVYLQGPIWAKIPHTDGNFHPSPLMGGFGLKHPPPQILIKNTPVPADPPTTFSQAKLASFITQYSTGQVSVEIEWELQKENSKRWNPEIQYTSNYYKSTNVDFAVNSEGTYSEPRPIGTRYLTRNL

SEQ ID NO: 4989 - DNA, 2217 bp, Adeno-associated virus
  source 1..2217: mol_type = genomic DNA
atggctgctgacggttatcttccagattggctcgaggacaacctctctgagggcattcgcgagtggtgggacctgaaacctggagcccccaagcccaaggccaaccagcagaagcaggacgacggccggggtctggtgcttcctggctacaagtacctcggacccttcaacggactcgacaagggggagcccgtcaacgcggcggacgcagcggccctcgagcacgacaaggcctacgaccagcagctcaaagcgggtgacaatccgtacctgcggtataaccacgccgacgccgagtttcaggagcgtctgcaagaagatacgtcttttgggggcaacctcgggcgagcagtcttccaggccaagaagcgggttctcgaacctctcggtctggttgaggaagctgctaagacggctcctggaaagaagagaccggtagaaccgtcacctcagcgttcccccgactcctccacgggcatcggcaagaaaggccagcagcccgctaaaaagagactgaactttggtcagactggcgactcagagtcagtccccgaccctcaaccaatcggagaaccaccagcaggcccctctggtctgggatctggtacaatggctgcaggcggtggcgctccaatggcagacaataacgaaggcgccgacggagtgggtagttcctcaggaaattggcattgcgattccacatggctgggcgacagagtcatcaccaccagcacccgaacctgggccctgcccacctacaacaaccacctctacaagcaaatatccaatgggacatcgggaggaagcaccaacgacaacacctacttcggctacagcaccccctgggggtattttgacttcaacagattccactgccacttctcaccacgtgactggcagcgactcatcaacaacaactggggattccggccaaaaagactcagcttcaagctcttcaacatccaggtcaaggaggtcacgcaggatgaaggcaccaagaccatcgccaataaccttaccagcacgattcaggtatttacggactcggaataccagctgccgtacgtcctcggctccgcgcaccagggctgcctgcctccgttcccggcggacgtcttcatgattccccagtacggctaccttacactgaacaatggaagtcaagccgtaggccgttcctccttctactgcctggaatattttccatctcaaatgctgcgaactggaaacaattttgaattcagctacaccttcgaggacgtgcctttccacagcagctacgcacacagccagagcttggaccgactgatgaatcctctcatcgaccagtacctgtactacttatccagaactcagtccacaggaggaactcaaggtacccagcaattgttattttctcaagctgggcctgcaaacatgtcggctcgggctaagaactggctacctggaccttgctaccggcagcagcgagtctctacgacactgtcgcaaaacaacaacagcaactttgcttggactggtgccaccaaatatcacctgaacggaagagactctttggtaaatcccggtgttgctatggcaacgcataaggacgacgaggaacgtttctttccatcgagcggagtcctgatgtttggaaaacagggtgctggaagagacaatgtggactatagcagcgttatgctaaccagcgaggaagaaattaaaaccactaaccctgtagccacagaacaatacggtgtggtggctgacaacttgcagcaagccaatacagggcctattgtgggaaatgtcaacagccaaggagccttacctggcatggtctggcagaaccgagacgtgtacctgcagggtcccatctgggccaaaattcctcacacggacggcaattttcacccgtctcctctgatgggcggctttggactgaagcacccacctccccagatcctgatcaagaatacgccggtacctgcggatcctccaacgacgttcagccaggcaaaattggcttccttcatcacgcagtacagcaccggccaggtcagcgtggagatcgagtgggagctgcagaaggagaacagcaagcgatggaacccagaaattcagtacacttccaactactacaaatctacaaatgtggactttgctgtcaattctgagggtacatattcagagcctcgccccattggtactcgttatctgacacgtaatctgtaa

SEQ ID NO: 4990 - DNA, 2211 bp, Adeno-associated virus
  source 1..2211: mol_type = genomic DNA
atggctgccgatggttatcttccagattggctcgaggacaacctctctgagggcattcgcgagtggtgggacttgaaacctggagccccgaaacccaaagccaaccagcaaaagcaggacgacggccggggcctggtgcttcctggctacaagtacctcggacccttcaacggactcgacaagggggagcccgtcaacgcggcggacgcagcggccctcgagcacgacaaggcctacgaccagcagctcgaagcgggtgacaatccgtacctgcggtataaccacgccgacgccgagtttcaggagcgtctgcaagaagatacgtcttttgggggcaacctcgggcgagcagtcttccaggccaagaagcgggttctcgaacctctcggtctggttgaggaaggcgctaagacggctcctggaaagaagagaccagtagagcagtcaccccaagaaccagactcctcctcgggcatcggcaagaaaggccaacagcccgccagaaaaagactcaattttggccagactggcgactcagagtcagttccagaccctcaacctctcggagaacctccagcagcgccctctggtgtgggacctaatacaatggctgcaggcggtggcgcaccaatggcagacaataacgaaggcgccgacggagtgggtagttcctcgggaaattggcattgcgattccacatggctgggcgacagagtcatcaccaccagcacccgaacctgggccctgcccacctacaacaaccacctctacaagcaaatctccaacgggacatcgggaggagccaccaacgacaacacctacttcggctacagcaccccctgggggtattttgactttaacagattccactgccacttttcaccacgtgactggcagcgactcatcaacaacaactggggattccggcccaagagactcagcttcaagctcttcaacatccaggtcaaggaggtcacgcagaatgaaggcaccaagaccatcgccaataacctcaccagcaccatccaggtgtttacggactcggagtaccagctgccgtacgttctcggctctgcccaccagggctgcctgcctccgttcccggcggacgtgttcatgattccccagtacggctacctaacactcaacaacggtagtcaggccgtgggacgctcctccttctactgcctggaatactttccttcgcagatgctgagaaccggcaacaacttccagtttacttacaccttcgaggacgtgcctttccacagcagctacgcccacagccagagcttggaccggctgatgaatcctctgattgaccagtacctgtactacttgtctcggactcaaacaacaggaggcacggcaaatacgcagactctgggcttcagccaaggtgggcctaatacaatggccaatcaggcaaagaactggctgccaggaccctgttaccgccaacaacgcgtctcaacgacaaccgggcaaaacaacaatagcaactttgcctggactgctgggaccaaataccatctgaatggaagaaattcattggctaatcctggcatcgctatggcaacacacaaagacgacgaggagcgttttttcccagtaacgggatcctgtttttggcaacaaaatgctgccagagacaatgcggattacagcgatgtcatgctcaccagcgaggaagaaatcaaaaccactaaccctgtggctacagaggaatacggtatcgtggcagataacttgcagcagcaaaacacggctcctcaaattggaactgtcaacagccagggggccttacccggtatggtctggcagaaccgggacgtgtacctgcagggtcccatctgggccaagattcctcacacggacggcaacttccacccgtctccgctgatgggcggctttggcctgaaacatcctccgcctcagatcctgatcaagaacacgcctgtacctgcggatcctccgaccaccttcaaccagtcaaagctgaactctttcatcacgcaatacagcaccggacaggtcagcgtggaaattgaatgggagctacagaaggaaaacagcaagcgctggaaccccgagatccagtacacctccaactactacaaatctacaagtgtggactttgctgttaatacagaaggcgtgtactctgaaccccgccccattggcacccgttacctcacccgtaatctgtaa

SEQ ID NO: 4991 - protein, 736 aa, Adeno-associated virus
MAADGYLPDWLEDNLSEGIREWWDLKPGAPKPKANQQKQDDGRGLVLPGYKYLGPFNGLDKGEPVNAADAAALEHDKAYDQQLEAGDNPYLRYNHADAEFQERLQEDTSFGGNLGRAVFQAKKRVLEPLGLVEEGAKTAPGKKRPVEQSPQEPDSSSGIGKKGQQPARKRLNFGQTGDSESVPDPQPLGEPPAAPSGVGPNTMAAGGGAPMADNNEGADGVGSSSGNWHCDSTWLGDRVITTSTRTWALPTYNNHLYKQISNGTSGGATNDNTYFGYSTPWGYFDFNRFHCHFSPRDWQRLINNNWGFRPKRLSFKLFNIQVKEVTQNEGTKTIANNLTSTIQVFTDSEYQLPYVLGSAHQGCLPPFPADVFMIPQYGYLTLNNGSQAVGRSSFYCLEYFPSQMLRTGNNFQFTYTFEDVPFHSSYAHSQSLDRLMNPLIDQYLYYLSRTQTTGGTANTQTLGFSQGGPNTMANQAKNWLPGPCYRQQRVSTTTGQNNNSNFAWTAGTKYHLNGRNSLANPGIAMATHKDDEERFFPVTGSCFWQQNAARDNADYSDVMLTSEEEIKTTNPVATEEYGIVADNLQQQNTAPQIGTVNSQGALPGMVWQNRDVYLQGPIWAKIPHTDGNFHPSPLMGGFGLKHPPPQILIKNTPVPADPPTTFNQSKLNSFITQYSTGQVSVEIEWELQKENSKRWNPEIQYTSNYYKSTSVDFAVNTEGVYSEPRPIGTRYLTRNL

SEQ ID NO: 4992 - DNA, 2214 bp, Adeno-associated virus
  source 1..2214: mol_type = genomic DNA
atggctgctgacggttatcttccagattggctcgaggacaacctctctgagggcattcgcgagtggtgggacctgaaacctggagcccccaagcccaaggccaaccagcagaagcaggacgacggccggggtctggtgcttcctggctacaagtacctcggacccttcaacggactcgacaagggggagcccgtcagcgcggcggacgcagcggccctcgagcacgacaaggcctgcgaccagcggctcaaagcgggtgacaatccgtacctgcggtataaccacgccgacgccgagtttcaggagcgtctgcaagaagatacgtcttttgggggcaacctcgggcgagcagtcttccaggccaagaagcgggttctcgaacctctcggtctggttgaggaagctgctaagacggctcctggaaagaagggaccggtagaaccgtcacctcagcgttcccccgactcctccacgggcatcggcaagaaaggccagcagcccgctagaaagagactgaactttgggcagactggcgactcagagtcagtccccgaccctcaaccaatcggagaaccaccagcaggcccctctggtctgggatctggtacaatggctgcaggcggtggcgcaccaatggctgacaataacgagggcgccgacggagtgggtaatgcctcaggaaattggcattgcgattccacatggctgggcgacagagtcatcaccaccagcacccgaacctgggctttgcccacctacaacaatcacctctacaagcaaatctccagtcagtcagcaggtagcaccaacgacaacgtctacttcggctacagcaccccctgggggtattttgacttcaacagattccactgtcacttctcaccacgtgactggcagcggctcatcaacaacaactggggattccggcccaagaagctcaacttcaagctgttcaacatccaggtcaaggaggtcacaacgaatgacggcgtcacgaccatcgccaataaccttaccagcacggttcaggtcttttcggactcggaataccagctgccctacgtcctcggctccgcacaccagggctgcctgcctccgttcccggcggacgtcttcatgattccccagtacggctacctgactctgaacaatggcagccaatcggtgggtcgttcctctttctactgcctggaatatttcccttctcaaatgctgagaacgggcaacaacttcaccttcagctacaccttcgaggacgttcccttccacagcagctacgcacacagccagagcctggaccggctgatgaatcctcttatcgaccagtacctgtattacctggccagaacacagagcaacgcaggaggcacagctggcaatcgggaactgcagttttatcagggcgggcctaccaccatggccgaacaagccaaaaactggctgcctggaccttgcttccggcaacaaagagtctccaagacgctggatcaaaacaacaacagcaactttgcttggactggtgccaccaaataccatctaaatggaagaaattcattggttaatcccggtgtcgccatggcaacccacaaggacgacgaggaacgcttcttcccttcgagcggagtcctgatttttggaaaaactggagcagctaataagactacactggaaaatgtgttaatgacaaatgaagaggaaattcgtcctaccaacccggtagccaccgaggaatacgggactgttagcagcaacctgcaggcggctaacactgcagcccagacacaagttgtcaacaaccagggagccttacctggtatggtctggcagaaccgggacgtgtacctgcagggtcccatctgggccaagattcctcacacggacggcaactttcacccgtctccgctgatgggcggctttggactgaagcatccgcctcctcagatcctgatcaaaaacactcctgttcctgctaatcccccggaggtgtttacgcctgccaagtttgcttctttcatcacacagtacagcaccggccaggtcagcgtggagatcgagtgggagctgcagaaggagaacagcaagcgctggaacccagagattcagtatacctccaattttgacgaacagactggtgtggactttgccgttgacagccagggtgtttattctgagcctcgccccattggtactcgttacctcacccgtaatctgtaa

SEQ ID NO: 4993 - protein, 737 aa, Adeno-associated virus
MAADGYLPDWLEDNLSEGIREWWDLKPGAPKPKANQQKQDDGRGLVLPGYKYLGPFNGLDKGEPVSAADAAALEHDKACDQRLKAGDNPYLRYNHADAEFQERLQEDTSFGGNLGRAVFQAKKRVLEPLGLVEEAAKTAPGKKGPVEPSPQRSPDSSTGIGKKGQQPARKRLNFGQTGDSESVPDPQPIGEPPAGPSGLGSGTMAAGGGAPMADNNEGADGVGNASGNWHCDSTWLGDRVITTSTRTWALPTYNNHLYKQISSQSAGSTNDNVYFGYSTPWGYFDFNRFHCHFSPRDWQRLINNNWGFRPKKLNFKLFNIQVKEVTTNDGVTTIANNLTSTVQVFSDSEYQLPYVLGSAHQGCLPPFPADVFMIPQYGYLTLNNGSQSVGRSSFYCLEYFPSQMLRTGNNFTFSYTFEDVPFHSSYAHSQSLDRLMNPLIDQYLYYLARTQSNAGGTAGNRELQFYQGGPTTMAEQAKNWLPGPCFRQQRVSKTLDQNNNSNFAWTGATKYHLNGRNSLVNPGVAMATHKDDEERFFPSSGVLIFGKTGAANKTTLENVLMTNEEEIRPTNPVATEEYGTVSSNLQAANTAAQTQVVNNQGALPGMVWQNRDVYLQGPIWAKIPHTDGNFHPSPLMGGFGLKHPPPQILIKNTPVPANPPEVFTPAKFASFITQYSTGQVSVEIEWELQKENSKRWNPEIQYTSNFDEQTGVDFAVDSQGVYSEPRPIGTRYLTRNL

SEQ ID NO: 4994 - DNA, 2214 bp, Adeno-associated virus
  source 1..2214: mol_type = genomic DNA
atggctgccgatggttatcttccagattggctcgaggacaacctctctgagggcattcgcgagtggtgggacctgaaacctggagccccgaaacccaaagccaaccagcaaaagcaggacgacggccggggtctggtgcttcctggctacaagtacctcggacccttcaacggactcgacaagggggagcccgtcaacgcggcggacgcagcggccctcgagcacgacaaggcctacgaccagcagctcaaagcgggtgacaatccgtacctgcggtataaccacgccgacgccgagtttcaggagcgtctgcaagaagatacgtcttttgggggcaacctcgggcgagcagtcttccaggccaagaagcgggttctcgaacctctcggtctggttgaggaagctgctaagacggctcctggaaagaagagaccggtagaaccgtcacctcagcgttcccccgactcctccacgggcatcggcaagaaaggccagcagcccgctagaaagagactgaactttgggcagactggcgactcagagtcagtccccgaccctcaaccaatcggagaaccaccagcaggcccctctggtctgggatctggtacaatggctgcaggcggtggcgctccaatggcagacaataacgaaggcgccgacggagtgggtaatgcctcaggaaattggcattgcgattccacatggctgggcgacagagtcatcaccaccagcacccgaacctgggctttgcccacctacaacaaccacctctacaagcaaatctccagtcagtcagcaggtagcaccaacgacaacgtctacttcggctacagcaccccctgggggtattttgacttcaacagattccactgtcacttctcaccacgtgactggcagcggctcatcaacaacaactggggattccggcccaagaagctcaacttcaagctgttcaacatccaggtcaaggaggtcacaacgaatgacggcgtcacgaccatcgccaataaccttaccagcacggttcaggtcttttcggactcggaataccagctgccctacgtcctcggctccgcacaccagggctgcctgcctccgttcccggcggacgtcttcatgattcctcagtacggctacctgactctcaacaacggtagtcaggccgtgggacgttcctccttctactgcctggagtacttcccctctcagatgctgagaacgggcaacaacttttccttcagctacactttcgaggacgtgcctttccacagcagctacgcgcacagccagagtttggacaggctgatgaatcctctcatcgaccagtacctgtactacctgtcaagaacccagtctacgggaggcacagcgggaacccagcagttgctgttttctcaggccgggcctagcaacatgtcgactcaggccagaaactggctgcctggaccctgctacagacagcagcgcgtctccacgacactgtcgcaaaacaacaacagcaactttgcctggactggtgccaccaagtatcatctgaacggcagagactctctggtgaatccgggcgtcgccatggcaaccaacaaggacgacgaggaccgcttcttcccatccagcggcatcctcatgtttggcaagcagggagctggaaaagacaacgtggactatagcaacgtgatgctaaccagcgaggaagaaatcaagaccaccaaccccgtggccacagaacagtatggcgtggtggctgataacctacagcagcaaaacaccgctcctattgtgggggccgtcaacagccagggagccttacctggcatggtctggcagaaccgggacgtgtacctgcagggtcctatttgggccaagattcctcacacagatggcaactttcacccgtctcctttaatgggcggctttggacttaaacatccgcctcctcagatccttatcaaaaacactcctgttcctgcggatcctccaacagcgttcaaccaggccaagctgaattctttcatcacgcagtacagcaccggacaagtcagcgtggagatcgagtgggagctgcagaaggagaacagcaagcgctggaacccagagattcagtatacttccaactactacaaatctacaaatgtggactttgctgttaatactgagggtgcttactctgagcctcgccccattggcactcgttacctcacccgtaatctgtaa

SEQ ID NO: 4995 - protein, 737 aa, Adeno-associated virus
MAADGYLPDWLEDNLSEGIREWWDLKPGAPKPKANQQKQDDGRGLVLPGYKYLGPFNGLDKGEPVNAADAAALEHDKAYDQQLKAGDNPYLRYNHADAEFQERLQEDTSFGGNLGRAVFQAKKRVLEPLGLVEEAAKTAPGKKRPVEPSPQRSPDSSTGIGKKGQQPARKRLNFGQTGDSESVPDPQPIGEPPAGPSGLGSGTMAAGGGAPMADNNEGADGVGNASGNWHCDSTWLGDRVITTSTRTWALPTYNNHLYKQISSQSAGSTNDNVYFGYSTPWGYFDFNRFHCHFSPRDWQRLINNNWGFRPKKLNFKLFNIQVKEVTTNDGVTTIANNLTSTVQVFSDSEYQLPYVLGSAHQGCLPPFPADVFMIPQYGYLTLNNGSQAVGRSSFYCLEYFPSQMLRTGNNFSFSYTFEDVPFHSSYAHSQSLDRLMNPLIDQYLYYLSRTQSTGGTAGTQQLLFSQAGPSNMSTQARNWLPGPCYRQQRVSTTLSQNNNSNFAWTGATKYHLNGRDSLVNPGVAMATNKDDEDRFFPSSGILMFGKQGAGKDNVDYSNVMLTSEEEIKTTNPVATEQYGVVADNLQQQNTAPIVGAVNSQGALPGMVWQNRDVYLQGPIWAKIPHTDGNFHPSPLMGGFGLKHPPPQILIKNTPVPADPPTAFNQAKLNSFITQYSTGQVSVEIEWELQKENSKRWNPEIQYTSNYYKSTNVDFAVNTEGAYSEPRPIGTRYLTRNL

SEQ ID NO: 4996 - DNA, 2217 bp, Adeno-associated virus
  source 1..2217: mol_type = genomic DNA
atggctgccgatggttatcttccagattggctcgaggacaacctctctgagggcattcgcgagtggtgggacctgaaacctggagccccgaaacccaaagccaaccagcaaaagcaggacgacggccggggtctggtgcttcctggctacaagtacctcggacccttcaacggactcgacaagggggagcccgtcaacgcggcggacgcagcggccctcgagcacgacaaggcctacgaccagcagctcaaagcgggtgacaatccgtacctgcggtataatcacgccgacgccgagtttcaggagcgtctgcaagaagatacgtcttttgggggcaacctcgggcgagcagtcttccaggccaagaagcgggttctcgaacctctcggtctggttgaggaaggcgctaagacggctcctggaaagaagagaccggtagagccgtcaccacagcgttcccccgactcctccacgggcatcggcaagaaaggccagcagcccgccagaaagagactcaatttcggtcagactggcgactcagagtcagtccccgaccctcaacctatcggagaacctccagcagcgccctctagtgtgggatctggtacaatggctgcaggcggtggcgcaccaatggcagacaataacgaaggtgccgacggagtgggtagttcctcgggaaattggcattgcgattccacatggctgggcgacagagtcatcaccaccagcacccgaacctgggccctgcccacctacaacaaccacctctacaagcaaatctccaacgggacctcgggaggcagcaccaacgacaacacctactttggctacagcaccccctgggggtattttgactttaacagattccactgccacttctcaccacgtgactggcagcgactcatcaacaacaactggggattccggcccaagagactcagcttcaagctcttcaacatccaggtcaaagaggtcacgcagaatgaaggcaccaagaccatcgccaataacctcaccagcaccatccaggtgtttacggactcggaataccagctgccgtacgtcctcggctctgcccaccagggctgcctgcctccgttcccggcggacgtcttcatgattcctcagtacggctacctgactctcaacaacggtagtcaggccgtgggacgttcctccttctactgcctggagtacttcccctctcagatgctgagaacgggcaacaacttttccttcagctacactttcgaggacgtgcctttccacagcagctacgcgcacagccagagtttggacaggctgatgaatcctctcatcgaccagtacctgtactacctgtcaagaacccagtctacgggaggcacagcgggaacccagcagttgctgttttctcaggccgggcctagcaacatgtcggctcaggccagaaactggctgcctggaccctgctacagacagcagcgcgtctccacgacactgtcgcaaaacaacaacagcaactttgcctggactggtgccaccaagtatcatctgaacggcagagactctctggtgaatccgggcgtcgccatggcaaccaacaaggacgacgaggaccgcttcttcccatccagcggcatcctcatgtttggcaagcagggagctggaaaagacaacgtggactatagcaacgtgatgctaaccagcgaggaagaaatcaaggccaccaaccccgtggccacagaacagtatggcgtggtggctgataacctacagcagcaaaacaccgctcctattgtgggggccgtcaacagccagggagccttacctggcatggtctggcagaaccgggacgtgtacctgcagggtcctatttgggccaagattcctcacacagatggcaactttcacccgtctcctttaatgggcggctttggacttaaacatccgcctcctcagatcctcatcaaaaacactcctgttcctgcggatcctccaacagcgttcaaccaggccaagctgaattctttcatcacgcagtacagcaccggacaagtcagcgtggagatcgagtgggagctgcagaaggagaacagcaagcgctggaacccagagattcagtatacttccaactactacaaatctacaaatgtggactttgctgttaatactgagggtgtttactctgagcctcgccccattggcactcgttacctcacccgtaatctgtaa

SEQ ID NO: 4997 - protein, 738 aa, Adeno-associated virus
MAADGYLPDWLEDNLSEGIREWWDLKPGAPKPKANQQKQDDGRGLVLPGYKYLGPFNGLDKGEPVNAADAAALEHDKAYDQQLKAGDNPYLRYNHADAEFQERLQEDTSFGGNLGRAVFQAKKRVLEPLGLVEEGAKTAPGKKRPVEPSPQRSPDSSTGIGKKGQQPARKRLNFGQTGDSESVPDPQPIGEPPAAPSSVGSGTMAAGGGAPMADNNEGADGVGSSSGNWHCDSTWLGDRVITTSTRTWALPTYNNHLYKQISNGTSGGSTNDNTYFGYSTPWGYFDFNRFHCHFSPRDWQRLINNNWGFRPKRLSFKLFNIQVKEVTQNEGTKTIANNLTSTIQVFTDSEYQLPYVLGSAHQGCLPPFPADVFMIPQYGYLTLNNGSQAVGRSSFYCLEYFPSQMLRTGNNFSFSYTFEDVPFHSSYAHSQSLDRLMNPLIDQYLYYLSRTQSTGGTAGTQQLLFSQAGPSNMSAQARNWLPGPCYRQQRVSTTLSQNNNSNFAWTGATKYHLNGRDSLVNPGVAMATNKDDEDRFFPSSGILMFGKQGAGKDNVDYSNVMLTSEEEIKATNPVATEQYGVVADNLQQQNTAPIVGAVNSQGALPGMVWQNRDVYLQGPIWAKIPHTDGNFHPSPLMGGFGLKHPPPQILIKNTPVPADPPTAFNQAKLNSFITQYSTGQVSVEIEWELQKENSKRWNPEIQYTSNYYKSTNVDFAVNTEGVYSEPRPIGTRYLTRNL

SEQ ID NO: 4998 - DNA, 2217 bp, Adeno-associated virus
  source 1..2217: mol_type = genomic DNA
atggctgccgatggttatcttccagattggctcgaggacaacctctctgagggcattcgcgagtggtgggacctgaaacctggagccccgaaacccaaagccaaccagcaaaagcaggacgacggccggggtctggtgcttcctggctacaagcacctcggacccttcaacggactcgacaagggggagcccgtcaacgcggcggacgcagcggccctcgagcacgacaaggcctacgaccagcagctcaaagcgggtgacaatccgtacctgcggtataatcacgctgacgccgagtttcaggagcgtctgcaagaagatacgtcttttgggggcaacctcgggcgagcagtcttccaggccaagaagcgggttctcgaacctctcggtctggttgaggaaggcgctaagacggctcctggaaagaagagaccggtagagccgtcaccacagcgttcccccgactcctccacgggcatcggcaagaaaggccagcagcccgccagaaagagactcaatttcggtcagactggcgactcagagtcagtccccgaccctcaacctatcggagaacctccagcagcgccctctagtgtgggatctggtacaatggctgcaggcggtggcgcaccaatggcagacaataacgaaggtgccgacggagtgggtagttcctcgggaaattggcattgcgattccacatggctgggcgacagagtcatcaccaccagcacccgaacctgggccctgcccacctacaacaaccacctctacaagcaaatctccaacgggacctcgggaggcagcaccaacgacaacacctactttggctacagcaccccctgggggtattttgactttaacagattccactgccacttctcaccacgtgactggcagcgactcatcaacaacaactggggattccggcccaagagactcagcttcaagctcttcaacatccaggtcaaagaggtcacgcagaatgaaggcaccaagaccatcgccaataaccttaccagcacggttcaggtcttttcggactcggaataccagctgccctacgtcctcggctccgcacaccagggctgcctgcctccgttcccggcggacgtcttcatgattccccagtacggctacctgactctgaacaatggcagccaatcggtgggtcgttcctctttctactgcctggaatatttcccttctcaaatgctgagaacgggcaacaacttcaccttcagctacaccttcgaggacgttcccttccacagcagctacgcacacagccagagcctggaccggctgatgaatcctcttatcgaccagtacctgtattacctggccagaacacagagcaacgcaggaggcacagctggcaatcgggaactgcagttttatcagggcgggcctaccaccatggccgaacaagccaaaaactggctgcctggaccttgcttccggcaacaaagagtctccaagacgctggatcaaaacaacaacagcaactttgcttggactggtgccaccaaataccatctaaatggaagaaattcattggttaatcccggtgtcgccatggcaacccacaaggacgacgaggaacgcttcttcccttcgagcggagtcctgatttttggaaaaactggagcagctaataagactacactggaaaatgtgttaatgacaaatgaagaggaaattcgtcctaccaacccggtagccaccgaggaatacgggactgttagcagcaacctgcaggcggctaacactgcagcccagacacaagttgtcaacaaccagggagccttacctggtatggtctggcagaaccgggacgtgtacctgcagggtcccatctgggccaagattcctcacacggacggcaactttcacccgtctccgctgatgggcggctttggactgaagcatccgcctcctcagatcctgatcaaaaacactcctgttcctgctaatcccccggaggtgtttacgcctgccaagtttgcttctttcatcacacagtacagcaccggccaggtcagcgtggagatcgagtgggagctgcagaaggagaacagcaagcgctggaacccagagattcagtatacctccaattttgacaaacagactggtgtggactttgccgttgacagccagggtgtttattctgagcctcgccccattggtactcgttacctcacccgtaatctgtaa

SEQ ID NO: 4999 - protein, 738 aa, Adeno-associated virus
MAADGYLPDWLEDNLSEGIREWWDLKPGAPKPKANQQKQDDGRGLVLPGYKHLGPFNGLDKGEPVNAADAAALEHDKAYDQQLKAGDNPYLRYNHADAEFQERLQEDTSFGGNLGRAVFQAKKRVLEPLGLVEEGAKTAPGKKRPVEPSPQRSPDSSTGIGKKGQQPARKRLNFGQTGDSESVPDPQPIGEPPAAPSSVGSGTMAAGGGAPMADNNEGADGVGSSSGNWHCDSTWLGDRVITTSTRTWALPTYNNHLYKQISNGTSGGSTNDNTYFGYSTPWGYFDFNRFHCHFSPRDWQRLINNNWGFRPKRLSFKLFNIQVKEVTQNEGTKTIANNLTSTVQVFSDSEYQLPYVLGSAHQGCLPPFPADVFMIPQYGYLTLNNGSQSVGRSSFYCLEYFPSQMLRTGNNFTFSYTFEDVPFHSSYAHSQSLDRLMNPLIDQYLYYLARTQSNAGGTAGNRELQFYQGGPTTMAEQAKNWLPGPCFRQQRVSKTLDQNNNSNFAWTGATKYHLNGRNSLVNPGVAMATHKDDEERFFPSSGVLIFGKTGAANKTTLENVLMTNEEEIRPTNPVATEEYGTVSSNLQAANTAAQTQVVNNQGALPGMVWQNRDVYLQGPIWAKIPHTDGNFHPSPLMGGFGLKHPPPQILIKNTPVPANPPEVFTPAKFASFITQYSTGQVSVEIEWELQKENSKRWNPEIQYTSNFDKQTGVDFAVDSQGVYSEPRPIGTRYLTRNL

SEQ ID NO: 5000 - protein, 737 aa, Adeno-associated virus
MAADGYLPDWLEDNLSEGIREWWDLKPGAPKPKANQQKQDDGRGLVLPGYKYLGPFNGLDKGEPVNAADAAALEHDKAYDQQLKAGDNPYLRYNHADAEFQERLQEDTSFGGNLGRAVFQAKKRVLEPLGLVEEAAKTAPGKKRPVEPSPQRSPDSSTGIGKKGQQPARKRLNFGQTGDSESVPDPQPIGEPPAGPSGLGSGTMAAGGGAPMADNNKGADGVGNASGNWHCDSTWLGDRVITTSTRTWALPTYNNHLYKQISSQSAGSTNDNVYFGYSTPWGYFDFNRFHCHFSPRDWQRLINSNWGFRPKKLNFKLFNIQVKEVTTNDGVTTIANNLTSTVQVFSDSEYQLPYVLGSAHQGCLPPFPADVFMIPQYGYLTLNNGSQSVGRSSFYCLEYFPSQMLRTGNNFTFSYTFEDVPFHSSYAHSQSLDRLMNPLIDQYLYYLARTQSNAGGTAGNRELQFYQGGPTTMAEQAKNWLPGPCFRQQRVSKTLDQNNNSNFAWTGATKYHLNGRNSLVNPGVAMATHKDDEERFFPSSGVLIFGKTGAANKTTLENVLMTNEEEIRPTNPVATEEYGTVSSNLQAANTAAQTQVVNNQGALPGMVWQNRDVYLQGPIWAKIPHTDGNFHPSPLMGGFGLKHPPPQILIKNTPVPANPPEVFTPAKFASFITQYSTGQVSVEIEWELQKENSKRWNPEIQYTSNFDKQTGVDFAVDSQGVYSEPRPIGTRYLTRNL

SEQ ID NO: 5001 - DNA, 2214 bp, Adeno-associated virus
  source 1..2214: mol_type = genomic DNA
atggctgctgacggttatcttccagattggctcgaggacaacctctctgagggcattcgcgagtggtgggacctgaaacctggagcccccaagcccaaggccaaccagcagaagcaggacgacggccggggtctggtgcttcctggctacaagtacctcggacccttcaacggactcgacaagggggagcccgtcaacgcggcggacgcagcggccctcgagcacgacaaggcctacgaccagcagctcaaagcgggtgacaatccgtacctgcggtataaccacgccgacgccgagtttcaggagcgtctgcaagaagatacgtcttttgggggcaacctcgggcgagcagtcttccaggccaagaagcgggttctcgaacctctcggtctggttgaggaagctgctaagacggctcctggaaagaagagaccggtagaaccgtcacctcagcgttcccccgactcctccacgggcatcggcaagaaaggccagcagcccgctagaaagagactgaactttgggcagactggcgactcagagtcagtccccgaccctcaaccaatcggagaaccaccagcaggcccctctggtctgggatctggtacaatggctgcaggcggtggcgcaccaatggctgacaataacaagggcgccgacggagtgggtaatgcctcaggaaattggcattgcgattccacatggctgggcgacagagtcatcaccaccagcacccgaacctgggctttgcccacctacaacaaccacctctacaagcaaatctccagtcagtcagcaggtagcaccaacgacaacgtctacttcggctacagcaccccctgggggtattttgacttcaacagattccactgtcacttctcaccacgtgactggcagcggctcatcaacagcaactggggattccggcccaagaagctcaacttcaagctgttcaacatccaggtcaaggaggtcacaacgaatgacggcgtcacgaccatcgccaataaccttaccagcacggttcaggtcttttcggactcggaataccagctgccctacgtcctcggctccgcacaccagggctgcctgcctccgttcccggcggacgtcttcatgattccccagtacggctacctgactctgaacaatggcagccaatcggtgggtcgttcctctttctactgcctggaatatttcccttctcaaatgctgagaacgggcaacaacttcaccttcagctacaccttcgaggacgttcccttccacagcagctacgcacacagccagagcctggaccggctgatgaatcctcttatcgaccagtacctgtattacctggccagaacacagagcaacgcaggaggcacagctggcaatcgggaactgcagttttatcagggcgggcctaccaccatggccgaacaagccaaaaactggctgcctggaccttgcttccggcaacaaagagtctccaagacgctggatcaaaacaacaacagcaactttgcttggactggtgccaccaaataccatctaaatggaagaaattcattggttaatcccggtgtcgccatggcaacccacaaggacgacgaggaacgcttcttcccttcgagcggagtcctgatttttggaaaaactggagcagctaataagactacactggaaaatgtgttaatgacaaatgaagaggaaattcgtcctaccaacccggtagccaccgaggaatacgggactgttagcagcaacctgcaggcggctaacactgcagcccagacacaagttgtcaacaaccagggagccttacctggtatggtctggcagaaccgggacgtgtacctgcagggtcccatctgggccaagattcctcacacggacggcaactttcacccgtctccgctgatgggcggctttggactgaagcatccgcctcctcagatcctgatcaaaaacactcctgttcctgctaatcccccggaggtgtttacgcctgccaagtttgcttctttcatcacacagtacagcaccggccaggtcagcgtggagatcgagtgggagctgcagaaggagaacagcaagcgctggaacccagagattcagtatacctccaattttgacaaacagactggtgtggactttgccgttgacagccagggtgtttattctgagcctcgccccattggtactcgttacctcacccgtaatctgtaa

SEQ ID NO: 5002 - protein, 737 aa, Adeno-associated virus
MAADGYLPDWLEDNLSEGIREWWDLKPGAPKPKANQQKQDDGRGLVLPGYKYLGPFNGLDKGEPVNAADAAALEHDKAYDQQLKAGDNPYLRYNHADAEFQERLQEDTSFGGNLGRAVFQAKKRVLEPLGLVEEAAKTAPGKKRPVEPSPQRSPDSSTGIGKKGQQPARKRLNFGQTGDSESVPDPQPIGEPPAGPSGLGSGTMAAGGGAPMADNNEGADGVGNASGNWHCDSTWLGDRVITTSTRTWALPTYNNHLYKQISSQSAGSTNDNVYFGYSTPWGYFDFNRFHCHFSPRDWQRLINSNWGFRPKKLNFKLFNIQVKEVTTNDGVTTIANNLTSTVQVFSDSEYQLPYVLGSAHQGCLPPFPADVFMIPQYGYLTLNNGSQSVGRSSFYCLEYFPSQMLRTGNNFTFSYTFEDVPFHSSYAHSQSLDRLMNPLIDQYLYYLARTQSNAGGTAGNRELQFYQGGPTTMAEQAKNWLPGPCFRQQRVSKTLDQNNNSNFAWTGATKYHLNGRNSLVNPGVAMATHKDDEERFFPSSGVLIFGKTGAANKTTLENVLMTNEEEIRPTNPVATEEYGTVSSNLQAANTAAQTQVVNNQGALPGMVWQNRDVYLQGPIWAKIPHTDGNFHPSPLMGGFGLKHPPPQILIKNTPVPANPPEVFTPAKFASFITQYSTGQVSVEIEWELQKENSKRWNPEIQYTSNFDKQTGVDFAVDSQGVYSEPRPIGTRYLTRNL

SEQ ID NO: 5003 - protein, 737 aa, Adeno-associated virus
MAADGYLPDWLEDNLSEGIREWWDLKPGAPKPKANQQKQDDGRGLVLPGYKYLGPFNGLDKGEPVNAADAAALEHDKAYDQQLKAGDNPYLRYNHADAEFQERLQEDTSFGGNLGRAVFQAKKRVLEPLGLVEEAAKTAPGKKRPVEPSPQRSPDSSTGIGKKGQQPARKRLNFGQTGDSESVPDPQPIGEPPAGPSGLGSGTMAAGGGAPMADNNEGADGVGNASGNWHCDSTWLGDRVITTSTRTWALPTYNNHLYKQISSQSAGSTNDNVYFGYSTPWGYFDFNRFHCHFSPRDWQRLINNNWGFRPKKLNFKLFNIQVKEVTTNDGVTTIANNLTSTVQVFSDSEYQLPYVLGSAHQGCLPPFPADVFMIPQYGYLTLNNGSQSVGRSSFYCLEYFPSQMLRTGNNFTFSYTFEDVPFHSSYAHSQSLDRLMNPLIDQYLYYLARTQSNAGGTAGNRELQFYQGGPTTMAEQAKNWLPGPCFRQQRVSKTLDQNNNSNFAWTGATKYHLNGRNSLVNPGVAMATHKDDEERFFPSSGVLIFGKTGAANKTTLENVLMTNEEEIRPTNPVATEEYGTVSSNLQAANTAAQTQVVNNQGALPGMVWQNRDVYLQGPIWAKIPHTDGNFHPSPLMGGFGLKHPPPQILIKNTPVPANPPEVFTPAKFASFITQYSTGQVSVEIEWELQKENSKRWNPEIQYTSNFDKQTGVDFAVDSQGVYSEPRPIGTRYLTRNL

SEQ ID NO: 5004 - protein, 737 aa, Adeno-associated virus
MAADGYLPDWLEDNLSEGIREWWDLKPGAPKPKANQQKQDDGRGLVLPGYKYLGPFNGLDKGEPVNAADAAALEHDKAYDQQLKAGDNPYLRYNHADAEFQERLQEDTSFGGNLGRAVFQAKKRVLEPLGLVEEAAKTAPGKKRPVEPSPQRSPDSSTGIGKKGQQPARKRLNFGQTGDSESVPDPQPIGEPPAGPSGLGSGTMAAGGGAPMADNNKGADGVGNASGNWHCDSTWLGDRVITTSTRTWALPTYNNHLYKQISSQSAGSTNDNVYFGYSTPWGYFDFNRFHCHFSPRDWQRLINNNWGFRPKKLNFKLFNIQVKEVTTNDGVTTIANNLTSTVQVFSDSEYQLPYVLGSAHQGCLPPFPADVFMIPQYGYLTLNNGSQSVGRSSFYCLEYFPSQMLRTGNNFTFSYTFEDVPFHSSYAHSQSLDRLMNPLIDQYLYYLARTQSNAGGTAGNRELQFYQGGPTTMAEQAKNWLPGPCFRQQRVSKTLDQNNNSNFAWTGATKYHLNGRNSLVNPGVAMATHKDDEERFFPSSGVLIFGKTGAANKTTLENVLMTNEEEIRPTNPVATEEYGTVSSNLQAANTAAQTQVVNNQGALPGMVWQNRDVYLQGPIWAKIPHTDGNFHPSPLMGGFGLKHPPPQILIKNTPVPANPPEVFTPAKFASFITQYSTGQVSVEIEWELQKENSKRWNPEIQYTSNFDKQTGVDFAVDSQGVYSEPRPIGTRYLTRNL

SEQ ID NO: 5005 - DNA, 2217 bp, Adeno-associated virus
  source 1..2217: mol_type = genomic DNA
atggctgccgatggttatcttccagattggctcgaggacaacctctctgagggcattcgcgagtggtgggacctgaaacctggagccccgaaacccaaagccaaccagcaaaagcaggacgacggccggggtctggtgcttcctggctacaagtacctcggacccttcaacggactcgacaagggggagcccgtcaacgcggcggacgcagcggccctcgagcacgacaaggcctacgaccagcagctcaaagcgggtgacaatccgcacctgcggtataatcacgccgacgccgagtttcaggagcgtctgcaagaagatacgtcttttgggggcaacctcgggcgagcagtcttccaggccaagaagcgggttctcgaacctctcggtctggttgaggaaggcgctaagacggctcctggaaagaagagaccggtagagccgtcaccacagcgttcccccgactcctccacgggcatcggcaagaaaggccagcagcccgccagaaagagactcaatttcggtcagactggcgactcagagtcagtccccgaccctcaacttatcggagaacctccagcagcgccctctagtgtgggatctggtacaatggctgcaggcggtggcgcaccaatggcagacaataacgaaggtgccgacggagtgggtagttcctcgggaaattggcattgcgattccacatggctgggcgacagagtcatcaccaccagcacccgaacctgggccctgcccacctacaacaaccacctctacaagcaaatctccaacgggacctcgggaggcagcaccaacgacaacacctactttggctacagcaccccctgggggtattttgactttaacagattccactgccacttctcaccacgtgactggcagcgactcatcaacaacaactggggattccggcccaagagactcagcttcaagctcttcaacatccaggtcaaagaggtcacgcagaatgaaggcaccaagaccatcgccaataacctcaccagcaccatccaggtgtttacggactcggagtaccagctgccgtacgtcctcggctctgcccaccagggctgcctgcctccgttcccggcggacgtcttcatgattcctcagtacggcaacctgactctcaacaacggtagtcaggccgtgggacgttcctccttctactgcctggagtacttcccctctcagatgctgagaacgggcaacaacttttccttcagctacactttcgaggacgtgcctttccacagcagctacgcgcacagccagagtttggacaggctgatgaatcctctcatcgaccagtacctgtactacctgtcaagaacccagtctacgggaggcacagcgggaacccagcagttgctgttttctcaggccgggcctagcaacatgtcggctcaggccagaaactggctgcctggaccctgctacagacagcagcgcgtctccacgacactgtcgcaaaacaacaacagcaactttgcctggactggtgccaccaagtatcatctgaacggcagagactctctggtgaatccgggcgtcgccatggcaaccaacaaggacgacgaggaccgcttcttcccatccagcggcatcctcatgtttggcaagcagggagctggaaaagacaacatgggctatagcaacgtgatgctaaccagcgaggaagaaatcaagaccaccaaccccgtggccacagaacagtatggcgtggtggctgataacctacagcagcaaaacaccgctcctattgtgggggccgtcaacagccagggagccttacctggcatggtctggcagaaccgggacgtgtacctgcagggtcctatttgggccaagattcctcacacagatggcaactttcacccgtctcctttaatgggcggctttggacttaaacatccgcctcctcagatcctcatcaaaaacactcctgttcctgcggatcctccaacagcgttcaaccaggccaagctgaattctttcatcacgcagtacggcaccggacaagtcagcgtggagatcgagtgggagctgcagaaggagaacagcaagcgctggaacccagagattcagtatacttccaactactacaaatctacaaatgtggactttgctgttaatactgagggtgtttactctgagcctcgccccattggcactcgttacctcacccgtaatctgtaa

SEQ ID NO: 5006 - protein, 738 aa, Adeno-associated virus
MAADGYLPDWLEDNLSEGIREWWDLKPGAPKPKANQQKQDDGRGLVLPGYKYLGPFNGLDKGEPVNAADAAALEHDKAYDQQLKAGDNPHLRYNHADAEFQERLQEDTSFGGNLGRAVFQAKKRVLEPLGLVEEGAKTAPGKKRPVEPSPQRSPDSSTGIGKKGQQPARKRLNFGQTGDSESVPDPQLIGEPPAAPSSVGSGTMAAGGGAPMADNNEGADGVGSSSGNWHCDSTWLGDRVITTSTRTWALPTYNNHLYKQISNGTSGGSTNDNTYFGYSTPWGYFDFNRFHCHFSPRDWQRLINNNWGFRPKRLSFKLFNIQVKEVTQNEGTKTIANNLTSTIQVFTDSEYQLPYVLGSAHQGCLPPFPADVFMIPQYGNLTLNNGSQAVGRSSFYCLEYFPSQMLRTGNNFSFSYTFEDVPFHSSYAHSQSLDRLMNPLIDQYLYYLSRTQSTGGTAGTQQLLFSQAGPSNMSAQARNWLPGPCYRQQRVSTTLSQNNNSNFAWTGATKYHLNGRDSLVNPGVAMATNKDDEDRFFPSSGILMFGKQGAGKDNMGYSNVMLTSEEEIKTTNPVATEQYGVVADNLQQQNTAPIVGAVNSQGALPGMVWQNRDVYLQGPIWAKIPHTDGNFHPSPLMGGFGLKHPPPQILIKNTPVPADPPTAFNQAKLNSFITQYGTGQVSVEIEWELQKENSKRWNPEIQYTSNYYKSTNVDFAVNTEGVYSEPRPIGTRYLTRNL

SEQ ID NO: 5007 - DNA, 2217 bp, Adeno-associated virus
  source 1..2217: mol_type = genomic DNA
atggctgccgatggttatcttccagattggctcgaggacaacctctctgagggcattcgcgagtggtgggacctgaaacctggagccccgaaacccaaagccaaccagcaaaagcaggacgacggccggggtctggtgcttcctggctacaagtacctcggacccttcaacggactcgacaagggggagcccgtcaacgcggcggacgcagcggccctcgagcacgacaaggcctacgaccagcagctcaaagcgggtgacaatccgtacctgcggtataatcacgccgacgccgagtttcaggagcgtctgcaagaagatacgtcttttgggggcaacctcgggcgagcagtcttccaggccaagaagcgggttctcgaacctctcggtctggttgaggaaggcgctaagacggctcctggaaagaagagaccggtagagccgtcaccacagcgttcccccgactcctccacgggcatcggcaagaaaggccagcagcccgccggaaagagactcaatttcggtcagactggcgactcagagtcagtccccgaccctcaacctatcggagaacctccagcagcgccctctagtgtgggatctggtacaatggctgcaggcggtggcgcaccaatggcagacaataacgaaggtgccgacggagtgggtagttcctcgggaaattggcattgcgattccacatggctgggcgacagagtcatcaccaccagcacccgaacctgggccctgcccacctacaacaaccacctctacaagcaaatctccaacgggacctcgggaggcagcaccaacgacaacacctactttggctacagcaccccctgggggtattttgactttaacagattccactgccacttctcaccacgtgactggcagcgactcatcaacaacaactggggattccggcccaagagactcagcttcaagctcttcaacatccaggtcaaagaggtcacgcagaatgaaggcaccaagaccatcgccaataacctcaccagcaccatccaggtgtttacggactcggaataccagctgccgtacgtcctcggctctgcccaccagggctgcctgcctccgttcccggcggacgtcttcatgattcctcagtacggctacctgactctcaacaacggtagtcaggccgtgggacgttcctccttctactgcctggagtacttcccctctcagatgctgagaacgggcaacaacttttccttcagctacactttcgaggacgtgcctttccacagcagctacgcgcacagccagagtttggacaggctgatgaatcctctcgtcgaccagtacctgtactacctgtcaagaacccagtctacgggaggcacagcgggaacccagcagttgctgttttctcaggccgggcctagcaacatgtcggctcaggccagaaactggctgcctggaccctgctacagacagcagcgcgtctccacgacactgtcgcaaaacaacaacagcaactttgcctggactggtgccaccaagtatcatctgaacggcagagactctctggtgaatccgggcgtcgccatggcaaccaacaaggacgacgaggaccgcttcttcccatccagcggcatcctcatgtttggcaagcagggagctggaaaagacaacgtggactatagcaacgtgatgctaaccagcgaggaagaaatcaagaccaccaaccccgtggccacagaacagtatggcgtggtggctgataacctacagcagcaaaacaccgctcctattgtgggggccgtcaacagccagggagccttacctggcatggtctggcagaaccgggacgtgtacctgcagggtcctatttgggccaagattcctcacacagatggcaactttcacccgtctcctttaatgggcggctttggacttaaacatccgcctcctcagatcctcatcaaaaacactcctgttcctgcggatcctccaacagcgttcaaccaggccaagctgaattctttcatcacgcagtacagcaccggacaagtcagcgtggagatcgagtgggagctgcagaaggagaacagcaagcgctggagcccagagattcagtatacttccaactactacaaatctacaaatgtggactttgctgttaatactgagggtgtttactctgagcctcgccccattggcactcgttacctcacccgtaatctgtaa

SEQ ID NO: 5008 - protein, 738 aa, Adeno-associated virus
MAADGYLPDWLEDNLSEGIREWWDLKPGAPKPKANQQKQDDGRGLVLPGYKYLGPFNGLDKGEPVNAADAAALEHDKAYDQQLKAGDNPYLRYNHADAEFQERLQEDTSFGGNLGRAVFQAKKRVLEPLGLVEEGAKTAPGKKRPVEPSPQRSPDSSTGIGKKGQQPAGKRLNFGQTGDSESVPDPQPIGEPPAAPSSVGSGTMAAGGGAPMADNNEGADGVGSSSGNWHCDSTWLGDRVITTSTRTWALPTYNNHLYKQISNGTSGGSTNDNTYFGYSTPWGYFDFNRFHCHFSPRDWQRLINNNWGFRPKRLSFKLFNIQVKEVTQNEGTKTIANNLTSTIQVFTDSEYQLPYVLGSAHQGCLPPFPADVFMIPQYGYLTLNNGSQAVGRSSFYCLEYFPSQMLRTGNNFSFSYTFEDVPFHSSYAHSQSLDRLMNPLVDQYLYYLSRTQSTGGTAGTQQLLFSQAGPSNMSAQARNWLPGPCYRQQRVSTTLSQNNNSNFAWTGATKYHLNGRDSLVNPGVAMATNKDDEDRFFPSSGILMFGKQGAGKDNVDYSNVMLTSEEEIKTTNPVATEQYGVVADNLQQQNTAPIVGAVNSQGALPGMVWQNRDVYLQGPIWAKIPHTDGNFHPSPLMGGFGLKHPPPQILIKNTPVPADPPTAFNQAKLNSFITQYSTGQVSVEIEWELQKENSKRWSPEIQYTSNYYKSTNVDFAVNTEGVYSEPRPIGTRYLTRNL

SEQ ID NO: 5009 - DNA, 2217 bp, Adeno-associated virus
  source 1..2217: mol_type = genomic DNA
atggttgccgatggttatcttccagattggctcgaggacaacctctctgagggcattcgcgagtggtgggacctgaaacctggagccccgaaacccaaagccaaccagcaaaagcagggcgacggccggggtctggtgcttcctggctacaagtacctcggacccttcaacggactcgacaagggggagcccgtcaacgcggcggacgcagcggccctcgagcacgacaaggcctacgaccagcagcttaaagcgggtgacaatccgtacctgcggtataatcacgccgacgccgagcttcaggagcgtctgcaagaagatacgtcttttgggggcaacctcgggcgagcagtcttccaggccaagaagcgggttctcgaacctctcggtctggttgaggaaggcgctaagacggctcctggaaagaagagaccggtagagccgtcaccacagcgttcccccgactcctccacgggcatcggcaagaaaggccagcagcccgccagaaagagactcaatttcggtcagactggcgactcagagtcagtccccgaccctcaacctatcggagaacctccagcagcgccctctagtgtgggatctggtacaatggctgcaggcggtggcgcgccaatggcagacaataacgaaggtgccgacggagtgggtagttcctcgggaaattggcattgcgattccacatggctgggcgacagagtcatcaccaccagcacccgaacctgggccctgcccacctacaacaaccacctctacaagcaaatctccaacgggacctcgggaggcagcaccaacgacaacacctactttggctacagcaccccctgggggtattttgactttaacagattccactgccacttctcaccacgtgactggcagcgactcatcaacaacaactggggattccggcccaagagactcagcttcaagctcttcaacatccaggtcaaagaggtcacgcagaatgaaggcaccaagaccatcgccaataacctcaccagcaccatccaggtgtttacggactcggaataccagctgccgtacgtcctcggctctgcccaccagggctgccagcctccgttcccggcggacgtcttcatgattcctcagtacggctacctgactctcaacaacggtagtcaggccgtgggacgttcctccttctactgcctggagtacttcccctctcagatgctgagaacgggcaacaacttttccttcagctacactttcgaggacgtgcctttccacagcagctacgcgcacagccagagtttggacaggctgatgaatcctctcatcgaccagtacctgtactacctgtcaagaacccagtctacgggaggcacagcgggaacccagcagttgctgttttctcaggccgggcctagcaacatgtcggctcaggccagaaactggctgcctggaccctgctacagacagcagcgcgtctccacgacactgtcgcaaaacaacaacagcaactttgcctggactggtgccaccaagtatcatctgaacggcagagactctctggtgaatccgggcgtcgccatggcaaccaacaaggacgacgaggaccgcttcttcccatccagcggcatcctcatgtttggcaagcagggagctggaaaagacaacgtggactatagcaacgtgatgctaaccagcgaggaagaaatcaagaccaccaaccccgtggccacagaacagtatggcgtggtggctgataacctacagcagcaaaacaccgctcctattgtgggggccgtcaacagccagggagccttacctggcatggtctggcagaaccgggacgtgtacctgcagggtcctatttgggccaagattcctcacacagatggcaactttcacccgtctcctttaatgggcggctttggacttaaacatccgcctcctcagatcctcatcaaaaacactcctgttcctgcggatcctccaacagcgttcaaccaggccaagctgaattctttcatcacgcagtacagcaccggacaagtcagcgtggagatcgagtgggagccgcagaaggagaacagcaagcgctggaacccagagattcagtatacttccaactactacaaatctacaaatgtggactttgctgttaatactgagggtgtttactctgagcctcgccccattggcactcgttacctcacccgtaatctgtaa

SEQ ID NO: 5010 - protein, 738 aa, Adeno-associated virus
MVADGYLPDWLEDNLSEGIREWWDLKPGAPKPKANQQKQGDGRGLVLPGYKYLGPFNGLDKGEPVNAADAAALEHDKAYDQQLKAGDNPYLRYNHADAELQERLQEDTSFGGNLGRAVFQAKKRVLEPLGLVEEGAKTAPGKKRPVEPSPQRSPDSSTGIGKKGQQPARKRLNFGQTGDSESVPDPQPIGEPPAAPSSVGSGTMAAGGGAPMADNNEGADGVGSSSGNWHCDSTWLGDRVITTSTRTWALPTYNNHLYKQISNGTSGGSTNDNTYFGYSTPWGYFDFNRFHCHFSPRDWQRLINNNWGFRPKRLSFKLFNIQVKEVTQNEGTKTIANNLTSTIQVFTDSEYQLPYVLGSAHQGCQPPFPADVFMIPQYGYLTLNNGSQAVGRSSFYCLEYFPSQMLRTGNNFSFSYTFEDVPFHSSYAHSQSLDRLMNPLIDQYLYYLSRTQSTGGTAGTQQLLFSQAGPSNMSAQARNWLPGPCYRQQRVSTTLSQNNNSNFAWTGATKYHLNGRDSLVNPGVAMATNKDDEDRFFPSSGILMFGKQGAGKDNVDYSNVMLTSEEEIKTTNPVATEQYGVVADNLQQQNTAPIVGAVNSQGALPGMVWQNRDVYLQGPIWAKIPHTDGNFHPSPLMGGFGLKHPPPQILIKNTPVPADPPTAFNQAKLNSFITQYSTGQVSVEIEWEPQKENSKRWNPEIQYTSNYYKSTNVDFAVNTEGVYSEPRPIGTRYLTRNL

SEQ ID NO: 5011 - DNA, 2217 bp, Adeno-associated virus
  source 1..2217: mol_type = genomic DNA
atggctgccgatggttatcttccagattggctcgaggacaacctctctgagggcattcgcgagtggtgggacctgaaacctggagccccgaaacccaaagccaaccagcaaaagcaggacgacggccggggtctggtgcttcctggctacaagtacctcggacccttcaacggactcgacaagggggagcccgtcaacgcggcggacgcagcggccctcgagcacgacaaggcctacgaccagcagctcaaagcgggtgacaatccgtacctgcggtataatcacgccgacgccgagtttcaggagcgtctgcaagaagatacgtcttttgggggcaacctcgggcgagcagtcttccaggccaagaagcgggttctcgaacctctcggtctggttgaggaaggcgctaagacggctcctggaaagaagagaccggtagagccgtcaccacagcgttcccccgactcctccacgggcatcggcaagaaaggccagcagcccgccagaaagagactcaatttcggtcagactggcgactcagagtcagtccccgaccctcaacctatcggagaacctccagcagcgccctctagtgtgggatctggtacaatggctgcaggcggtggcgcaccaatggcagacaataacgaaggtgccgacggagtgggtagttcctcgggaaattggcattgcgattccacatggctgggcgacagagtcatcaccaccagcacccgaacctgggccctgcccacctacaacaaccacctctacaagcaaatctccaacgggacctcgggaggcagcaccaacgacaacacctactttggctacagcaccccctgggggtattttgactttaacagattccactgccacttctcaccacgtgactggcagcgactcatcaacaacaactggggattccggcccaagagactcagcttcaagctcttcaacatccaggtcaaagaggtcacgcagaatgaaggcaccaagaccatcgccaatagcctcaccagcaccatccaggtgtttacggactcggaataccagctgccgtacgtcctcggctctgcccaccagggctgcctgcctccgttcccggcggacgtcttcatgattcctcagtacggctacctgactcccaacaacggtagtcaggccgtgggacgttcctccttctactgcctggagtacttcccctctcagatgctgagaacgggcaacaacttttccttcagctacactttcgaggacgtgcctttccacagcagctacgcgcacagccagagtttggacaggctgatgaatcctctcatcgaccagtacctgtactacctgtcaagaacccagtctacgggaggcacagcgggaacccagcagttgctgtcttctcaggccgggcctagcaacatgtcggctcaggccagaaactggctgcctggaccctgctacagacagcagcgcgtctccacgacactgtcgcaaaacaacaacagcaactttgcctggactggtgccaccaagtatcatctgaacggcagagactctctggtgaatccgggcgtcgccatggcaaccaacaaggacgacgaggaccgcttcttcccatccagcggcatcctcatgtttggcaagcagggagctggaaaagacaacgtggactatagcaacgtgatgctaaccagcgaggaagaaatcaagaccaccaaccccgtggccacagaacagtatggcgtggtggctgataacctacagcagcaaaacaccgctcctattgtgggggccgtcaacagccagggagccttacctggcatggtctggcagaaccgggacgtgtacttgcagggtcctatttgggccaagattcctcacacagatggcaactttcacccgtctcctttaatgggcggctttggacttaaacatccgcctcctcagatcctcatcaaaaacactcctgttcctgcggatcctccaacagcgttcaaccaggccaagctgaattctttcatcacgcagtacagcaccggacaagtcagcgtggagatcgagtgggagctgcagaaggagaacagcaagcgctggaacccagagattcagtatacttccaactactacaaatctacaaatgtggactttgctgttaatactgagggtgtttactctgagcctcgccccattggcactcgttacctcacccgtaatctgtaa

SEQ ID NO: 5012 - protein, 738 aa, Adeno-associated virus
MAADGYLPDWLEDNLSEGIREWWDLKPGAPKPKANQQKQDDGRGLVLPGYKYLGPFNGLDKGEPVNAADAAALEHDKAYDQQLKAGDNPYLRYNHADAEFQERLQEDTSFGGNLGRAVFQAKKRVLEPLGLVEEGAKTAPGKKRPVEPSPQRSPDSSTGIGKKGQQPARKRLNFGQTGDSESVPDPQPIGEPPAAPSSVGSGTMAAGGGAPMADNNEGADGVGSSSGNWHCDSTWLGDRVITTSTRTWALPTYNNHLYKQISNGTSGGSTNDNTYFGYSTPWGYFDFNRFHCHFSPRDWQRLINNNWGFRPKRLSFKLFNIQVKEVTQNEGTKTIANSLTSTIQVFTDSEYQLPYVLGSAHQGCLPPFPADVFMIPQYGYLTPNNGSQAVGRSSFYCLEYFPSQMLRTGNNFSFSYTFEDVPFHSSYAHSQSLDRLMNPLIDQYLYYLSRTQSTGGTAGTQQLLSSQAGPSNMSAQARNWLPGPCYRQQRVSTTLSQNNNSNFAWTGATKYHLNGRDSLVNPGVAMATNKDDEDRFFPSSGILMFGKQGAGKDNVDYSNVMLTSEEEIKTTNPVATEQYGVVADNLQQQNTAPIVGAVNSQGALPGMVWQNRDVYLQGPIWAKIPHTDGNFHPSPLMGGFGLKHPPPQILIKNTPVPADPPTAFNQAKLNSFITQYSTGQVSVEIEWELQKENSKRWNPEIQYTSNYYKSTNVDFAVNTEGVYSEPRPIGTRYLTRNL

SEQ ID NO: 5013 - protein, 738 aa, Adeno-associated virus
MAADGYLPDWLEDNLSEGIREWWDLKPGAPKPKANQQKQDDGRGLVLPGYKYLGPFNGLDKGEPVNAADAAALEHDKAYDQQLKAGDNPYLRYNHADAEFQERLQEDTSFGGNLGRAVFQAKKRVLEPLGLVEEGAKTAPGKKRPVEPSPQRSPDSSTGIGKKGQQPARKRLNFGQTGDSESVPDPQPIGEPPAAPSSVGSGTMAAGGGAPMADNNEGADGVGSSSGNWHCDSTWLGDRVITTSTRTWALPTYNNHLYKQISNGTSGGSTNDNTYFGYSTPWGYFDFNRFHCHFSPRDWQRLINNNWGFRPKRLSFKLFNIQVKEVTQNEGTKTIANNLTSTIQVFTDSEYQLPYVLGSAHQGCLPPFPADVFMIPQYGYLTLNNGSQAVGRSSFYCLEYFPSQMLRTGNNFSFSYTFEDVPFHSSYVHSQSLDRLMNPLIDQYLYYLSRTQSTGGTAGTQQLLFSQAGPSNMSAQARNWLPGPCYRQQRVSTTLSQNNNSNFAWTGATKYHLNGRDSLVNSGVAMATNKDDEDRFFPSSGILMFGKQGAGKDNVDYSNVMLTSEEEIKTTNPVATEQYGVVADNLQQQNTAPIVGAVNSQGALPGMVWQNRDVYLQGPIWAKIPHTDGNFHPSPLMGGFGLKHPPPQILIKNTPVPADPPTAFNQAKLNSFITQYSTGQVSVEIEWELQKENSKRWNPEIQYTSNYYKSTNVDFAVNTEGVYSEPRPIGTRYPTRNL

SEQ ID NO: 5014 - DNA, 2217 bp, Adeno-associated virus
  source 1..2217: mol_type = genomic DNA
atggctgccgatggttatcttccagattggctcgaggacaacctctctgagggcattcgcgagtggtgggacctgaaacctggagccccgaaacccaaagccaaccagcaaaagcaggacgacggccggggtctggtgcttcctggctacaagtacctcggacccttcaacggactcgacaagggggagcccgtcaacgcggcggacgcagcggccctcgagcacgacaaggcctacgaccagcagctcaaagcgggtgacaatccgtacctgcggtataatcacgccgacgccgagtttcaggagcgtctgcaagaagatacgtcttttgggggcaacctcgggcgagcagtcttccaggccaagaagcgggttctcgaacctctcggtctggttgaggaaggcgctaagacggctcctggaaagaagagaccggtagagccgtcaccacagcgttcccccgactcctccacgggcatcggcaagaaaggccagcagcccgccagaaagagactcaatttcggtcagactggcgactcagagtcagtccccgaccctcaacctatcggagaacctccagcagcgccctctagtgtgggatctggtacaatggctgcaggcggtggcgcaccaatggcagacaataacgaaggtgccgacggagtgggtagttcctcgggaaattggcattgcgattccacatggctgggcgacagagtcatcaccaccagcacccgaacctgggccctgcccacctacaacaaccacctctacaagcaaatctccaacgggacctcgggaggcagcaccaacgacaacacctactttggctacagcaccccctgggggtattttgactttaacagattccactgccacttctcaccacgtgactggcagcgactcatcaacaacaactggggattccggcccaagagactcagcttcaagctcttcaacatccaggtcaaagaggtcacgcagaatgaaggcaccaagaccatcgccaataacctcaccagcaccatccaggtgtttacggactcggaataccagctgccgtacgtcctcggctctgcccaccagggctgcctgcctccgttcccggcggacgtcttcatgattcctcagtacggctacctgactctcaacaacggtagtcaggccgtgggacgttcctccttctactgcctggagtacttcccctctcagatgctgagaacgggcaacaacttttccttcagctacactttcgaggacgtgcctttccacagcagctacgtgcacagccagagtttggacaggctgatgaatcctctcatcgaccagtacctgtactacctgtcaagaacccagtctacgggaggcacagcgggaacccagcagttgctgttttctcaggccgggcctagcaacatgtcggctcaggccagaaactggctgcctggaccctgctacagacagcagcgcgtctccacgacactgtcgcaaaacaacaacagcaactttgcctggactggtgccaccaagtatcatctgaacggcagagactctctggtgaattcgggcgtcgccatggcaaccaacaaggacgacgaggaccgcttcttcccatccagcggcatcctcatgtttggcaagcagggagctggaaaagacaacgtggactatagcaacgtgatgctaaccagcgaggaagaaatcaagaccaccaaccccgtggccacagaacagtatggcgtggtggctgataacctacagcagcaaaacaccgctcctattgtgggggccgtcaacagccagggagccttacctggcatggtctggcagaaccgggacgtgtacctgcagggtcctatttgggccaagattcctcacacagatggcaactttcacccgtctcctttaatgggcggctttggacttaaacatccgcctcctcagatcctcatcaaaaacactcctgttcctgcggatcctccaacagcgttcaaccaggccaagctgaattctttcatcacgcagtacagcaccggacaagtcagcgtggagatcgagtgggagctgcagaaggagaacagcaagcgctggaacccagagattcagtatacttccaactactacaaatctacaaatgtggactttgctgttaatactgagggtgtttactctgagcctcgccccattggcactcgttaccccacccgtaatctgtaa

SEQ ID NO: 5015 - protein, 734 aa, Adeno-associated virus; identical to SEQ ID NO: 4911

SEQ ID NO: 5016 - DNA, 2214 bp, Adeno-associated virus
  source 1..2214: mol_type = genomic DNA
atggctgctgacggttatcttccagattggctcgaggacaacctctctgagggcattcgcgagtggtgggacctgaaacctggagccccgaaacccaaagccaaccagcagaagcaggacgacggccggggtctggtgcttcctggctacaagtacctcggacccttcaacggactcgacaagggggagcccgtcaacgcggcggacgcagcggccctcgagcacgacaaggcctacgaccagcagctcaaagcgggtgacaatccgtacctgcggtataaccacgccgacgccgagtttcaggagcgtctgcaagaagatacgtcttttgggggcaacctcgggcgagcagtcttccaggccaagaagcgggttctcgaacctctcggtctggttgaggaagctgctaagacggctcctggaaagaagagaccggtagaaccgtcacctcagcgttcccccgactcctccacgggcatcggcaagaaaggccagcagcccgctagaaagagactgaactttgggcagactggcgactcagagtcagtccccgaccctcaacctctcggagaaccaccagcaggcccctctggtctgggatctggtacaatggctgcaggcggtggcgctccaatggcagacaataacgaaggcgccgacggagtgggtaatgcctcaggaaattggcattgcgattccacatggctgggcgacagagtcatcaccaccagcacccgaacctgggctttgcccacctacaacaaccacctctacaagcaaatctccagtcagtcagcaggtagcaccaacgacaacgtctacttcggctacagcaccccctgggggtattttgacttcaacagattccactgtcacttctcaccacgtgactggcagcgactcatcaacaacaactggggattccggcccaagaagctcaacttcaagctcttcaacatccaagtcaaggaggtcacgacgaatgacggcgtcacgaccatcgctaataaccttaccagcacggttcaggtcttttcggactcggagtaccagctgccgtacgtcctcggctctgcccaccagggctgcctgcctccgttcccggcggacgtcttcatgattcctcagtacggctacctgactctgaacaatggcagccaatcggtgggacgttcatccttctactgcctggaatacttcccttctcaggtgctgagaacgggtaacaacttcaccttcagttacaccttcgaggacgtgcctttccacagcagctacgcgcacagccagagcctagaccggctgatgaatcccctcatcgaccagtacctgtattacctggctagaacacagagtaacccaggaggcacatctggcaatcgggaactgcagttttaccagggcgggccttccaccatggccgaacaagccaagaactggttacctggaccttgcttccggcaacaaagagtttccaaaacactggatcaaaacaacaacagcaactttgcttggactggtgccaccaaatatcacctgaacggcagaaactcattggtgaatcctggtgtcgccatggcaactcacaaggacgacgaggaccgctttttcccatccagcggagtcctgatttttggaaaaactggagcaaccaacaagactacattggaaaacgtgttaatgacaaatgaagaagaaattcgtcctactaatcctgtggccacagaagaatacgggatagtcagcagcaatttacaagcggccaatactgcagcccagacacaagttgtcaacaaccagggagccttacctggcatggtctggcagaaccgggacgtgtacctgcagggtcccatctgggccaaaattcctcacacagacggcaactttcacccgtctccgctgatgggcggctttggactgaagcatccgcctcctcagatcctgatcaaaaacactcctgttcctgctaatcccccggaggtgtttacgcctgccaagtttgcttctttcatcacacagtacagcaccggccaggtcagcgtggagatcgagtgggagctgcagaaggagaacagcaagcgctggaacccagagattcagtatacctccaattttgacaaacagactggtgtggactttgccgttgacagccagggtgtttattctgagcctcgccccattggtactcgttacctcacccgtaatctgtaa

SEQ ID NO: 5017 - protein, 737 aa, Adeno-associated virus
MAADGYLPDWLEDNLSEGIREWWDLKPGAPKPKANQQKQDDGRGLVLPGYKYLGPFNGLDKGEPVNAADAAALEHDKAYDQQLKAGDNPYLRYNHADAEFQERLQEDTSFGGNLGRAVFQAKKRVLEPLGLVEEAAKTAPGKKRPVEPSPQRSPDSSTGIGKKGQQPARKRLNFGQTGDSESVPDPQPLGEPPAGPSGLGSGTMAAGGGAPMADNNEGADGVGNASGNWHCDSTWLGDRVITTSTRTWALPTYNNHLYKQISSQSAGSTNDNVYFGYSTPWGYFDFNRFHCHFSPRDWQRLINNNWGFRPKKLNFKLFNIQVKEVTTNDGVTTIANNLTSTVQVFSDSEYQLPYVLGSAHQGCLPPFPADVFMIPQYGYLTLNNGSQSVGRSSFYCLEYFPSQVLRTGNNFTFSYTFEDVPFHSSYAHSQSLDRLMNPLIDQYLYYLARTQSNPGGTSGNRELQFYQGGPSTMAEQAKNWLPGPCFRQQRVSKTLDQNNNSNFAWTGATKYHLNGRNSLVNPGVAMATHKDDEDRFFPSSGVLIFGKTGATNKTTLENVLMTNEEEIRPTNPVATEEYGIVSSNLQAANTAAQTQVVNNQGALPGMVWQNRDVYLQGPIWAKIPHTDGNFHPSPLMGGFGLKHPPPQILIKNTPVPANPPEVFTPAKFASFITQYSTGQVSVEIEWELQKENSKRWNPEIQYTSNFDKQTGVDFAVDSQGVYSEPRPIGTRYLTRNL

SEQ ID NO: 5018 - DNA, 2214 bp, Adeno-associated virus
  source 1..2214: mol_type = genomic DNA
atggctgccgatggttatcttccagattggctcgaggacaacctctctgagggcattcgcgagtggtgggacctgaaacctggagccccgaaacccaaagccaaccagcaaaagcaggacgacggccggggtctggtgcttcctggctacaagtacctcggacccttcaacggactcgacaagggggagcccgtcaacgcggcggacgcagcggccctcgagcacgacaaggcctacgaccagcagctcaaagcgggtgacaatccgtacctgcggtataatcacgccgacgccgagtttcaggagcgtctgcaagaagatacgtcttttgggggcaacctcgggcgagcagtcttccaggccaagaagcgggttctcgaacctctcggtctggttgaggaaggcgctaagacggctcctggaaagaagagaccggtagagccgtcaccacagcgttcccccgactcctccacgggcatcggcaagaaaggccagcagcccgccagaaagagactcaatttcggtcagactggcgactcagagtcagtccccgaccctcaacctatcggagaacctccagcagcgccctctagtgtgggatctggtacaatggctgcaggcggtggcgcaccaatggcagacaataacgaaggtgccgacggagtgggtagttcctcgggaaattggcattgcgattccacacggctgggcgacagagtcatcaccaccagcacccggacctgggctttgcccacctacaacaaccacctctacaagcaaatctccagtcagtcagcaggtagcaccaacgacaacgtctacttcggctacagcaccccctgggggtattttgacttcaacagattccactgtcacttctcaccacgtgactggcagcggctcatcaacaacaactggggattccggcccaagaagctcaacttcaagctgttcaacatccaggtcaaggaggtcacaacgaatgacggcgtcacgaccatcgccaataaccttaccagcacggttcaggtcttttcggactcggaataccagctgccctacgtcctcggctccgcacaccagggctgcctgcctccgttcccggcggacgtcttcatgattccccagtacggctacctgactctgaacaatggcagccaatcggtgggtcgttcctctttctactgcctggaatatttcccttctcaaatgctgagaacgggcaacaacttcaccttcagctacaccttcgaggacgttcccttccacagcagctacgcacacagccagagcctggaccggctgatgaatcctcttatcgaccagtacctgtattacctggccagaacacagagcaacgcaggaggcacagctggcaatcgggaactgcagttttatcagggcgggcctaccaccatggccgaacaagccaaaaactggctgcctggaccttgcttccggcaacgaagagtctccaagacgctggatcaaaacaacaacagcaactttgcttggactggtgccaccaaataccatctaaatggaagaaattcattggttaatcccggtgtcgccatggcaacccacaaggacgacgaggaacgcttcttcccttcgagcggagtcctgatttttggaaaaactggagcagctaataagactacactggaaaatgtgttaatgacaaatgaagaggaaattcgtcctaccaacccggtagccaccgaggaatacgggactgttagcagcaacctgcaggcggctaacactgcagcccagacacaagttgtcaacaaccagggagccttacctggtatggtctggcagaaccgggacgtgtacctgcagggtcccatctgggccaagattcctcacacggacggcaactttcacccgtctccgctgatgggcggctttggactgaagcatccgcctcctcagatcctgatcaaaaacactcctgttcctgctaatcccccggaggtgtttacgcctgccaagtttgcttctttcatcacacagtacagcaccggccaggtcagcgtggagatcgagtgggagctgcagaaggagaacagcaagcgctggaacccagagattcagtatacctccaattttgacaaacagactggtgtggactttgccgttgacagccagggtgtttattctgagcctcgccccattggtactcgttacctcacccgtaatctgtaa

SEQ ID NO: 5019 - protein, 737 aa, Adeno-associated virus
MAADGYLPDWLEDNLSEGIREWWDLKPGAPKPKANQQKQDDGRGLVLPGYKYLGPFNGLDKGEPVNAADAAALEHDKAYDQQLKAGDNPYLRYNHADAEFQERLQEDTSFGGNLGRAVFQAKKRVLEPLGLVEEGAKTAPGKKRPVEPSPQRSPDSSTGIGKKGQQPARKRLNFGQTGDSESVPDPQPIGEPPAAPSSVGSGTMAAGGGAPMADNNEGADGVGSSSGNWHCDSTRLGDRVITTSTRTWALPTYNNHLYKQISSQSAGSTNDNVYFGYSTPWGYFDFNRFHCHFSPRDWQRLINNNWGFRPKKLNFKLFNIQVKEVTTNDGVTTIANNLTSTVQVFSDSEYQLPYVLGSAHQGCLPPFPADVFMIPQYGYLTLNNGSQSVGRSSFYCLEYFPSQMLRTGNNFTFSYTFEDVPFHSSYAHSQSLDRLMNPLIDQYLYYLARTQSNAGGTAGNRELQFYQGGPTTMAEQAKNWLPGPCFRQRRVSKTLDQNNNSNFAWTGATKYHLNGRNSLVNPGVAMATHKDDEERFFPSSGVLIFGKTGAANKTTLENVLMTNEEEIRPTNPVATEEYGTVSSNLQAANTAAQTQVVNNQGALPGMVWQNRDVYLQGPIWAKIPHTDGNFHPSPLMGGFGLKHPPPQILIKNTPVPANPPEVFTPAKFASFITQYSTGQVSVEIEWELQKENSKRWNPEIQYTSNFDKQTGVDFAVDSQGVYSEPRPIGTRYLTRNL

SEQ ID NO: 5020 - DNA, 2208 bp, Adeno-associated virus
  source 1..2208: mol_type = genomic DNA
atggctgccgatggttatcttccagattggctcgaggacactctctctgaaggaataagacagtggtggaagctcaaacctggcccaccaccaccaaagcccgcagagcggcataaggacgacagcaggggtcttgtgcttcctgggtacaagtacctcggacccttcaacggactcgacaagggggagccggtcaacgaggcagacgccgcggccctcgagcacgacaaggcctacgaccggcagctcgacagcggagacaacccgtacctcaagtacaaccacgccgacgcggagtttcaggagcgtcttaaagaagatacgtcttttgggggcaacctcggacgagcagtcttccaggcgaaaaagagggttcttgaacctctgggcctggttgaggaacctgttaagacggctccgggaaaaaagaggccggtagagcactctcctgcggagccagactcctcctcgggaaccggaaaagcgggccagcagcctgcaagaaaaagattgaattttggtcagactggagacgcagactccgtacctgacccccagcctctcggacagccaccagcagccccctctggtttgggatctactacaatggctacaggcagtggcgcaccaatggcagacaataacgagggtgccgatggagtgggtaattcttcaggaaattggcattgcgattcccaatggctgggcgacagagtcatcaccaccagcacccgaacctgggcccagcccacctacaacaaccacctctacaagcaaatctcaagccaatcaggagcctcaaacgacaaccactactttggctacagcaccccttgggggtattttgacttcaacagattccactgccacttttcaccacgtgactggcaaagactcatcaacaacaactggggattccgacccaagagactcaacttcaagctctttaacattcaagtcaaagaggtcacgcagaatgacggtacgacgacgattgccaataaccttaccagcacggttcaggtgtttactgactcggagtaccagctcccgtacgtcctcgggtcggcgcatcaaggatgcctcccgccgtttccagcggacgtcttcatggtcccacagtatggatacctcaccctgaacaacgggagtcaggcggtaggacgctcttccttttactgcctggagtactttccttctcagatgcttcgtactggaaacaactttcagttcagctacacctttgaagacgttcctttccacagcagctacgctcacagccagagtctggatcggctgatgaatcctctgatcgaccagtacctgtattatctgaacaaaacacaatcaaatagtggagctcttcagcagtctcggctactgtttagtcaagctggacccaccagcatgtctcttcaagctaaaaactggctacctggaccttgctacagacagcagcgtctgtcaaagcaggcaaacgacaacaacaacagcaactttccctggactgcggctacaaagtaccacctaaatggccgggactcgttggttaatccaggaccagctatggccagtcacaaagacgatgaagaaaagtttttccccatgcatggaaccctgatatttggtaaacaaggaacaaatgctaacgacgcggatttggacaatgtcatgattacagatgaagaagaaatccgcaccaccaatcccgtggctacggagcagtacggatatgtgtcaaataatttgcaaaactcaaatactggtccaactactggaactgtcaatcaccgaggagcgttacctggcatggtgtggcaggatcgagacgtgtacctgcagggacccatttgggccaagattcctcacaccgatggacactttcatccttctccactgatgggaggttttgggctcaaacacccgcctcctcagatcatgatcaaaaacactcccgttccagccaatcctcccacaaacttcagttctgccaagtttgcttctttcatcacacagtattccacggggcaggtcagcgtggagatcgagtgggagctgcagaaagagaacagcaaacgctggaatcccgaaattcagtacacttccaactacaacaaatctgttaatgtggactttactgtggacactaatggcgtgtattcagagcctcgccccattggcaccagatacctgactcgtaatctgtaa

SEQ ID NO: 5021 - protein, 735 aa, Adeno-associated virus
MAADGYLPDWLEDTLSEGIRQWWKLKPGPPPPKPAERHKDDSRGLVLPGYKYLGPFNGLDKGEPVNEADAAALEHDKAYDRQLDSGDNPYLKYNHADAEFQERLKEDTSFGGNLGRAVFQAKKRVLEPLGLVEEPVKTAPGKKRPVEHSPAEPDSSSGTGKAGQQPARKRLNFGQTGDADSVPDPQPLGQPPAAPSGLGSTTMATGSGAPMADNNEGADGVGNSSGNWHCDSQWLGDRVITTSTRTWAQPTYNNHLYKQISSQSGASNDNHYFGYSTPWGYFDFNRFHCHFSPRDWQRLINNNWGFRPKRLNFKLFNIQVKEVTQNDGTTTIANNLTSTVQVFTDSEYQLPYVLGSAHQGCLPPFPADVFMVPQYGYLTLNNGSQAVGRSSFYCLEYFPSQMLRTGNNFQFSYTFEDVPFHSSYAHSQSLDRLMNPLIDQYLYYLNKTQSNSGALQQSRLLFSQAGPTSMSLQAKNWLPGPCYRQQRLSKQANDNNNSNFPWTAATKYHLNGRDSLVNPGPAMASHKDDEEKFFPMHGTLIFGKQGTNANDADLDNVMITDEEEIRTTNPVATEQYGYVSNNLQNSNTGPTTGTVNHRGALPGMVWQDRDVYLQGPIWAKIPHTDGHFHPSPLMGGFGLKHPPPQIMIKNTPVPANPPTNFSSAKFASFITQYSTGQVSVEIEWELQKENSKRWNPEIQYTSNYNKSVNVDFTVDTNGVYSEPRPIGTRYLTRNL

SEQ ID NO: 5022 - DNA, 2217 bp, Adeno-associated virus
  source 1..2217: mol_type = genomic DNA
atggctgccgatggttatcttccagattggctcgaggacaacctctctgagggcattcgcgagtggtgggcgctgaaacctggagccccgaagcccaaagccaaccagcaaaagcaggacgacggccggggtctggtgcttcctggctacaagtacctcggacccttcaacggactcgacaagggggagcccgtcaacgcggcggacgcagcggccctcgagcacgacaaggcctacgaccagcagctgcaggcgggtgacaatccgtacctgcggtataatcacgccgacgccgagtttcaggagcgtctgcaagaagatacgtcttttgggggcaacctcgggcgagcagtcttccaggccaagaagcgggttctcgaacctctcggtctggttgaggaaggcgctaagacggctcctggaaagaagagaccggtagagccgtcaccacagcgttcccccgactcctccacgggcatcggcaagaaaggccagcagcccgccagaaagagactcaatttcggtcagactggcgactcagagtcagtccccgaccctcaacctatcggagaacctccagcagcgccctctagtgtgggatctggtacaatggctgcaggcggtggcgcgccaatggcagacaataacgaaggtgccgacggagtgggtagttcctcgggaaattggcattgcgattccacatggctgggcgacagagtcatcaccaccagcacccgaacctgggccctgcccacctacaacaaccacctctacaagcaaacctccaacgggacctcgggaggcagcaccaacgacaacacctactttggctacagcaccccctgggggtattttgactttaacagattccactgccacttctcaccacgtgactggcagcgactcatcaacaacaactggggattccggcccaagagactcagcttcaagctcttcaacatccaggtcaaagaggtcacgcagaatgaaggcaccaagaccatcgccaataacctcaccagcaccatccaggtgtttacggactcggaataccagctgccgtacgtcctcggctctgcccaccagggctgcctgcctccgttcccggcggacgtcttcatgattcctcagtacggctacctgactctcaacaacggtagtcaggccgtgggacgttcctccttctactgcctggagtacttcccctctcagatgctgagaacgggcaacaacttttccttcagctacactttcgaggacgtgcctttccacagcagctacgcgcacagccagagtttggacaggctgatgaatcctctcatcgaccagtacctgtactacctgtcaagaacccagtctacgggaggcacagcgggaacccagcagttgctgttttctcaggccgggcctagcaacatgtcggctcaggccagaaactggctgcctggaccctgctacagacagcagcgcgtctccacgacactgtcgcaaaacaacaacagcaactttgcctggactggtgccaccaagtatcatctgaacggcagagactctctggtgaatccgggcgtcgccatggcaaccaacaaggacgacgaggaccgcttcttcccatccagcggcatcctcatgtttggcaagcagggagctggaaaagacaacgtggactatagcaacgtgatgctaaccagcgaggaagaaatcaagaccaccaaccccgtggccacagaacagtatggcgtggtggctgataacctacagcagcaaaacaccgctcctattgtgggggccgtcaacagccagggagccttacctggcatggtctggcagaaccgggacgtgtacctgcagggtcctatttgggccaagattcctcacacagatggcaactttcacccgtctcctttaatgggcggctttggacttaaacatccgcctcctcagatcctcatcaaaaacactcctgttcctgcggatcctccaacagcgttcaaccaggccaagctgaattctttcatcacgcagtacagcaccggacaagtcagcgcggagatcgagtgggagctgcagaaggagaacagcaagcgctggaacccagagattcagtatacttccaactactacaaatctacaaatgtggactttgctgttaatactgagggtgtttactctgagcctcgccccattggcactcgttacctcacccgtaatctgtaa

SEQ ID NO: 5023 - protein, 738 aa, Adeno-associated virus
MAADGYLPDWLEDNLSEGIREWWALKPGAPKPKANQQKQDDGRGLVLPGYKYLGPFNGLDKGEPVNAADAAALEHDKAYDQQLQAGDNPYLRYNHADAEFQERLQEDTSFGGNLGRAVFQAKKRVLEPLGLVEEGAKTAPGKKRPVEPSPQRSPDSSTGIGKKGQQPARKRLNFGQTGDSESVPDPQPIGEPPAAPSSVGSGTMAAGGGAPMADNNEGADGVGSSSGNWHCDSTWLGDRVITTSTRTWALPTYNNHLYKQTSNGTSGGSTNDNTYFGYSTPWGYFDFNRFHCHFSPRDWQRLINNNWGFRPKRLSFKLFNIQVKEVTQNEGTKTIANNLTSTIQVFTDSEYQLPYVLGSAHQGCLPPFPADVFMIPQYGYLTLNNGSQAVGRSSFYCLEYFPSQMLRTGNNFSFSYTFEDVPFHSSYAHSQSLDRLMNPLIDQYLYYLSRTQSTGGTAGTQQLLFSQAGPSNMSAQARNWLPGPCYRQQRVSTTLSQNNNSNFAWTGATKYHLNGRDSLVNPGVAMATNKDDEDRFFPSSGILMFGKQGAGKDNVDYSNVMLTSEEEIKTTNPVATEQYGVVADNLQQQNTAPIVGAVNSQGALPGMVWQNRDVYLQGPIWAKIPHTDGNFHPSPLMGGFGLKHPPPQILIKNTPVPADPPTAFNQAKLNSFITQYSTGQVSAEIEWELQKENSKRWNPEIQYTSNYYKSTNVDFAVNTEGVYSEPRPIGTRYLTRNL

SEQ ID NO: 5024 - DNA, 2217 bp, Adeno-associated virus
  source 1..2217: mol_type = genomic DNA
atggctgctgacggttatcttccagattggctcgaggacaacctctctgagggcattcgcgagtggtgggacctgaaacctggagcccccaagcccaaggccaaccagcagaagcaggacgacggccggggtctggtgcttcctggctacaagtacctcggacccttcaacggactcgacaagggggagcccgtcaacgcggcggacgcagcggccctcgagcacgacaaggcctacgaccagcagctcaaagcgggtgacaatccgtacctgcggtataatcacgccgacgccgagtttcaggagcgtctgcaagaagatacgtcttttgggggcaacctcgggcgagcagtcttccaggccaagaagcgggttctcgaacctctcggtctggttgaggaagctgctaagacggctcctggaaagaagagaccggtagaaccgtcacctcagcgttcccccgactcctccacgggcatcggcaagaaaggccagcagcccgctagaaagagactgaactttgggcagactggcgactcagagtcagtccccgaccctcaaccaatcggagaacctccagcagcgccctctagtgtgggatctggtacaatggccgcaggcggtggcgcaccaatggcagacaataacgaaggtgccgacggagtgggtagttcctcgggaaattggcattgcgattccacatggctgggcgacagagtcatcaccaccagcacccgaacctgggccctgcccacctacaacaaccacctctacaagcaaatctccaacgggacctcgggaggcagcaccaacgacaacacctactttggctacagcaccccctgggggtattttgactttaacagattccactgccacttctcaccacgtgactggcagcgactcatcaacaacaactggggattccggcccaagagactcagcttcaagctcttcaacatccaggtcaaagaggtcacgcagaatgaaggcaccaagaccatcgccaataacctcaccagcaccatccaggtgtttacggactcggaataccagctgccgtacgtcctcggctctgcccaccagggctgcctgcctccgttcccggcggacgtcttcatgattcctcagtacggctacctgactctcaacaacggtagtcaggccgtgggacgttcctccttctactgcctggagtacttcccctctcagatgctgagaacgggcaacaacttttccttcagctacactttcgaggacgtgcctttccacagcagctacgcgcacagccagagtttggacaggctgatgaatcctctcatcgaccagtacctgtactacctgtcaagaacccagtctacgggaggcacagcgggaacccagcagctgctgttttctcaggccgggcctagcaacatgtcggctcaggccagaaactggctgcctggaccctgctacagacagcagcgcgtctccacgacactgtcgcaaaacaacaacagcaactttgcctggactggtgccaccaagtatcatctgaacggcagagactctctggtgaatccgggcgtcgccatggcaaccaacaaggacgacgaggaccgcttcttcccatccagcggcatcctcatgtttggcaagcagggagctggaaaagacaacgtggactatagcaacgtgatgctaaccagcgaggaagaaatcaagaccaccaaccccgtggccacagaacagtatggcgtggtggctgataacctacagcagcaaaacaccgctcctattgtgggggccgtcaacagccagggagccttacctggcatggtctggcagaaccgggacgtgtacctgcagggtcctatttgggccaagattcctcacacagatggcaactttcacccgtctcctttaatgggcggctttggacttaaacatccgcctcctcagatcctcatcaaaagcactcctgttcctgcggatcctccaacagcgttcaaccaggccaagctgaattctttcatcacgcagtacagcaccggacaagtcagcgtggagatcgagtgggagctgcagaaggagaacagcaagtgctggaacccagagattcagtatacttccaactactacaaatctacaaatgtggactttgctgttaatactgagggtgtttactctgagcctcgccccattggcactcgttacctcacccgtaatctgtaa

SEQ ID NO: 5025 - protein, 738 aa, Adeno-associated virus
MAADGYLPDWLEDNLSEGIREWWDLKPGAPKPKANQQKQDDGRGLVLPGYKYLGPFNGLDKGEPVNAADAAALEHDKAYDQQLKAGDNPYLRYNHADAEFQERLQEDTSFGGNLGRAVFQAKKRVLEPLGLVEEAAKTAPGKKRPVEPSPQRSPDSSTGIGKKGQQPARKRLNFGQTGDSESVPDPQPIGEPPAAPSSVGSGTMAAGGGAPMADNNEGADGVGSSSGNWHCDSTWLGDRVITTSTRTWALPTYNNHLYKQISNGTSGGSTNDNTYFGYSTPWGYFDFNRFHCHFSPRDWQRLINNNWGFRPKRLSFKLFNIQVKEVTQNEGTKTIANNLTSTIQVFTDSEYQLPYVLGSAHQGCLPPFPADVFMIPQYGYLTLNNGSQAVGRSSFYCLEYFPSQMLRTGNNFSFSYTFEDVPFHSSYAHSQSLDRLMNPLIDQYLYYLSRTQSTGGTAGTQQLLFSQAGPSNMSAQARNWLPGPCYRQQRVSTTLSQNNNSNFAWTGATKYHLNGRDSLVNPGVAMATNKDDEDRFFPSSGILMFGKQGAGKDNVDYSNVMLTSEEEIKTTNPVATEQYGVVADNLQQQNTAPIVGAVNSQGALPGMVWQNRDVYLQGPIWAKIPHTDGNFHPSPLMGGFGLKHPPPQILIKSTPVPADPPTAFNQAKLNSFITQYSTGQVSVEIEWELQKENSKCWNPEIQYTSNYYKSTNVDFAVNTEGVYSEPRPIGTRYLTRNL

SEQ ID NO: 5026 - protein, 738 aa, Adeno-associated virus
MAADGYLPDWLEDNLSEGIREWWDLKPGAPKPKANQQKQDDGRGLVLPGYKYLGPFNGLDKGEPVNAADAAALEHDKAYDQQLKAGDNPYLRYNHADAEFQERLQEDTSFGGNLGRAVFQAKKRVLEPLGLVEEAAKTAPGKKRPVEPSPQRSPDSSTGIGKKGQQPARKRLNFGQTGDSESVPDPQPIGEPPAAPSSVGSGTMAAGGGAPMADNNEGADGVGSSSGNWHCDSTWLGDRVITTSTRTWALPTYNNHLYKQISNGTSGGSTNDNTYFGYSTPWGYFDFNRFHCHFSPRDWQRLINNNWGFRPKRLSFKLFNIQVKEVTQNEGTKTIANNLTSTIQVFTDSEYQLPYVLGSAHQGCLPPFPADVFMIPQYGYLTLNNGSQAVGRSSFYCLEYFPSQMLRTGNNFSFSYTFEDVPFHSSYAHSQSLDRLMNPLIDQYLYYLSRTQSTGGTAGTQQLLFSQAGPSNMSAQARNWLPGPCYRQQRVSTTLSQNNNSNFAWTGATKYHLNGRDSLVNPGVAMATNKDDEDRFFPSSGILMFGKQGAGKDNVDYSNVMLTSEEEIKTTNPVATEQYGVVADNLQQQNTAPIVGAVNSQGALPGMVWQNRDVYLQGPIWAKIPHTDGNFHPSPLMGGFGLKHPPPQILIKSTPVPADPPTAFNQAKLNSFITQYSTGQVSVEIEWELQKENSKRWNPEIQYTSNYYKSTNVDFAVNTEGVYSEPRPIGTRYLTRNL

SEQ ID NO: 5027 - DNA, 2217 bp, Adeno-associated virus
  source 1..2217: mol_type = genomic DNA
atggctgctgacggttatcttccagattggctcgaggacaacctctctgagggcattcgcgagtggtgggacctgaaacctggagcccccaagcccaaggccaaccagcagaagcaggacgacggccggggtctggtgcttcctggctacaagtacctcggacccttcaacggactcgacaagggggagcccgtcaacgcggcggacgcagcggccctcgagcacgacaaggcctacgaccagcagctcaaagcgggtgacaatccgtacctgcggtataaccacgccgacgccgagtttcaggagcgtctgcaagaagatacgtcttttgggggcaacctcgggcgagcagtcttccaggccaagaagcgggttctcgaacctctcggtctggttgaggaagctgctaagacggctcctggaaagaagagaccggtagaaccgtcacctcagcgttcccccgactcctccacgggcatcggcaagaaaggccagcagcccgctagaaagagactgaactttgggcagactggcgactcagagtcagtccccgaccctcaaccaatcggagaaccaccagcaggcccctctggtctgggatctggtacaatggctgcaggcggtggcgcaccaatggctgacaataacgagggcgccgacggagtgggtaatgcctcaggaaattggcattgcgattccacatggctgggcgacagagtcatcaccaccagcacccgaacctgggctttgcccacctacaacaaccacctctacaagcaaatctccagtcagtcagcaggtagcaccaacgacaacgtctacttcggctacagcaccccctgggggtattttgacttcaacagattccactgtcacttctcaccacgtgactggcagcggctcatcaacaacaactggggattccggcccaagaagctcaacttcaagctgttcaacatccaggtcaaggaggtcacaacgaatgacggcgtcacgaccatcgccaataaccctaccagcacggttcaggtcttttcggactcggaataccagctgccctacgtcctcggctccgcacaccagggctgcctgcctccgttcccggcggacgtcttcatgattccccagtacggctacctgactctgaacaatggcagccaatcggtgggtcgttcctctttctactgcctggaatatttcccttctcaaatgctgagaacgggcaacaacttcaccttcagctacaccttcgaggacgttcccttccacagcagctacgcacacagccagagcctggaccggctgatgaatcctcttatcgaccagtacctgtattacctggccagaacacagagcaacgcaggaggcacagctggcaatcgggaactgcagttttatcagggcgggcctaccaccatggccgaacaagccaaaaactggctgcctggaccctgctacagacagcagcgcgtctccacgacactgtcgcaaaacaacaacagcaactttgcctggactggtgccaccaagtatcatctgaacggcagagactctctggtgaatccgggcgtcgccatggcaaccaacaaggacgacgaggaccgcttcttcccatccagcggcatcctcatgtttggcaagcagggagctggaaaagacaacgtggactatagcaacgtgatgctaaccagcgaggaagaaatcaagaccaccaaccccgtggccacagaacagtatggcgtggtggctgataacctacagcagcaaaacaccgctcctattgtgggggccgtcaacagccagggagccttacctggcatggtctggcagaaccgggacgtgtacctgcagggtcctatttgggccaagattcctcacacagatggcaactttcacccgtctcctttaatgggcggctttggacttaaacatccgcctcctcagatcctcatcaaaaacactcctgttcctgcggatcctccaacagcgttcaaccaggccaagctgaattctttcatcacgcagtacagcaccggacaagtcagcgtggagatcgagtgggagctgcagaaggagaacagcaagcgctggaacccagagattcagtatacttccaactactacaaatctacaaatgtggactttgctgttaatactgagggtgtttactctgagcctcgccccattggcactcgttacctcacccgtaatctgtaa

SEQ ID NO: 5028 - protein, 738 aa, Adeno-associated virus
MAADGYLPDWLEDNLSEGIREWWDLKPGAPKPKANQQKQDDGRGLVLPGYKYLGPFNGLDKGEPVNAADAAALEHDKAYDQQLKAGDNPYLRYNHADAEFQERLQEDTSFGGNLGRAVFQAKKRVLEPLGLVEEAAKTAPGKKRPVEPSPQRSPDSSTGIGKKGQQPARKRLNFGQTGDSESVPDPQPIGEPPAGPSGLGSGTMAAGGGAPMADNNEGADGVGNASGNWHCDSTWLGDRVITTSTRTWALPTYNNHLYKQISSQSAGSTNDNVYFGYSTPWGYFDFNRFHCHFSPRDWQRLINNNWGFRPKKLNFKLFNIQVKEVTTNDGVTTIANNPTSTVQVFSDSEYQLPYVLGSAHQGCLPPFPADVFMIPQYGYLTLNNGSQSVGRSSFYCLEYFPSQMLRTGNNFTFSYTFEDVPFHSSYAHSQSLDRLMNPLIDQYLYYLARTQSNAGGTAGNRELQFYQGGPTTMAEQAKNWLPGPCYRQQRVSTTLSQNNNSNFAWTGATKYHLNGRDSLVNPGVAMATNKDDEDRFFPSSGILMFGKQGAGKDNVDYSNVMLTSEEEIKTTNPVATEQYGVVADNLQQQNTAPIVGAVNSQGALPGMVWQNRDVYLQGPIWAKIPHTDGNFHPSPLMGGFGLKHPPPQILIKNTPVPADPPTAFNQAKLNSFITQYSTGQVSVEIEWELQKENSKRWNPEIQYTSNYYKSTNVDFAVNTEGVYSEPRPIGTRYLTRNL

SEQ ID NO: 5029 - DNA, 2208 bp, Adeno-associated virus
  source 1..2208: mol_type = genomic DNA
atggctgccgatggttatcttccagattggctcgaggacaacctctctgagggcattcacgagtggtgggacccgaaacctggagccccgaaacccaaagccaaccagcaaaagcaggacgacggccggggtctggtgcttcctggctacaagtacctcggacccttcaacggactcgacaagggggagcccgtcaacgcggcggacgcagcggccctcgagcacgacaaggcctacgaccagcagctcaaagcgggtgacaatccgtacctgcggtataatcacgccgacgccgagtttcaggagcgtctgcaagaagatacgtcttttgggggcaacctcgggcgagcagtcttccaggccaagaagcgggttctcgaacctctcggtctggttgaggaaggcgctaagacggctcctggaaagaagagaccggtagagccgtcaccacagcgttcccccgactcctccacgggcatcggcaagaaaggccagcagcccgccagaaagagactcaatttcggtcagactggcgactcagagtcagtccccgaccctcaacctatcggagaacctccagcagcgccctctagtgtgggatctggtacaatggctgcaggcggtggcgcaccaatggcagacaataacgaaggtgccgacggagtgggtagttcctcgggaaattggcattgcgattccacatggctgggcgacagagtcatcaccaccagcacccgaacctgggccctgcccacccacaacaaccacctctacaagcaaatctccaacgggacctcgggaggcagcaccaacgacaacgtctacttcggctacagcaccccctgggggtattttgacttcaacagattccactgtcacttctcaccacgtgaccggcagcgactcatcaacaacaactggggattccggcccaagagactcagcttcaagctcttcaacatccaggtcaaagaggtcacgcagaatgaaggcaccaagaccatcgccaataacctcaccagcaccatccaggtgtttacggactcggaataccagctgccgtacgtcctcggctctgcccaccagggctgcctgcctccgttcccggcggacgtcttcatgattcctcagtacggctacctgactctcaacaacggtagtcaggccgtgggacgttcctccttctactgcctggagtacttcccctctcagatgctgagaacgggcaacaacttttccttcagctacactttcgaggacgtgcctttccacagcagctacgcgcacagccagagtttggacaggctgatgaatcctctcatcgaccagtacctgtactacctgtcaagaacccagtctacggaaggcacagcgggaacccagcagttgctgttttctcaggccgggcctagcaacatgtcggctcaggccagaaactggctgcctggaccctgctacagacagcagcgcgtctccacgacactgtcgcaaaacaacaacagcaactttgcctggactggtgccaccaagtatcatctgaacggcagagactctctggtgaatccgggcgtcgccatggcaacccacaaggacgacgaggaacgcttcttcccttcgagcggagtcctgatttttggaaaaactggagcagctaataagactacactggaaaatgtgttaatgacaaatgaagaggaaattcgtcctaccaacccggtagccaccgaggaatacgggactgttagcagcaacctgcaggcggctaacactgcagcccagacacaagttgtcaacaaccagggagccttacctggtatggtctggcagaaccgggacgtgtacctgcagggtcccatctgggccaagattcctcacacggacggcaactttcacccgtctccgctgatgggcggctttggactgaagcatcctcagatcctgatcaaaaacactcctgttcctgctaatcccccggaggtgtttacgcctgccaagtttgcttctttcatcacacagtacagcaccggccaggtcagcgtggagatcgagtgggagctgcagaaggagaacagcaagcgctggaacccagagattcagtatacctccaattttgacaaacagactggtgtggactttgccgttgacagccagggtgtttattctgagcctcgccccattggtactcgttacctcacccgtaatctgtaa

SEQ ID NO: 5030 - protein, 735 aa, Adeno-associated virus
MAADGYLPDWLEDNLSEGIHEWWDPKPGAPKPKANQQKQDDGRGLVLPGYKYLGPFNGLDKGEPVNAADAAALEHDKAYDQQLKAGDNPYLRYNHADAEFQERLQEDTSFGGNLGRAVFQAKKRVLEPLGLVEEGAKTAPGKKRPVEPSPQRSPDSSTGIGKKGQQPARKRLNFGQTGDSESVPDPQPIGEPPAAPSSVGSGTMAAGGGAPMADNNEGADGVGSSSGNWHCDSTWLGDRVITTSTRTWALPTHNNHLYKQISNGTSGGSTNDNVYFGYSTPWGYFDFNRFHCHFSPRDRQRLINNNWGFRPKRLSFKLFNIQVKEVTQNEGTKTIANNLTSTIQVFTDSEYQLPYVLGSAHQGCLPPFPADVFMIPQYGYLTLNNGSQAVGRSSFYCLEYFPSQMLRTGNNFSFSYTFEDVPFHSSYAHSQSLDRLMNPLIDQYLYYLSRTQSTEGTAGTQQLLFSQAGPSNMSAQARNWLPGPCYRQQRVSTTLSQNNNSNFAWTGATKYHLNGRDSLVNPGVAMATHKDDEERFFPSSGVLIFGKTGAANKTTLENVLMTNEEEIRPTNPVATEEYGTVSSNLQAANTAAQTQVVNNQGALPGMVWQNRDVYLQGPIWAKIPHTDGNFHPSPLMGGFGLKHPQILIKNTPVPANPPEVFTPAKFASFITQYSTGQVSVEIEWELQKENSKRWNPEIQYTSNFDKQTGVDFAVDSQGVYSEPRPIGTRYLTRNL

SEQ ID NO: 5031 - protein, 738 aa, Adeno-associated virus
MAADGYLPDWLEDNLSEGIREWWDLKPGAPKPKANQQKQDDGRGLVLPGYKYLGPFNGLDKGEPVNAADAAALEHDKAYDQQLKAGDNPYLRYNHADAEFQERLQEDTSFGGNLGRAVFQAKKRVLEPLGLVEEGAKTAPGKKRPVEPSPQRSPDSSTGIGKKGQQPARKRLNFGQTGDSESVPDPQPIGEPPAAPSSVGSGTMAAGGGAPMADNNEGADGVGSSSGNWHCDSTWLGDRVITTSTRTWALPTYNNHLYKQISNGTSGGSTNDNTYFGYSTPWGYFDFNRFHCHFSPRDWQRPINNNWGFRPKRLSFKLFNIQVKEVTQNEGTKTIANNLTSTIQVFTDSEYQLPYVLGSAHQGCLPPFPADVFMIPQYGYLTLNNGSQAVGRSSFYCLEYFPSQMLRTGNNFSFSYPFEDVPFHSSYAHSQSLDRLMNPLIDQYLYYLSRTQSTGGTAGTQQLLFSQAGPSNMSAQARNWLPGPCYRQQRVSTTLSQNNNSNFAWTGATKYHLNGRDSLVNPGVAMATNKDDEDRFFPSSGILMFGKQGAGKDNVDYSNVMLTSEEEIKTTNPVATEQYGVVADNLQQQDTAPIVGAVNSQGALPGMVWQNRDVYLQGPIWAKIPHTDGNFHPSPLMGGFGLKHPPPQVLIKNTPVPADPPTAFNQAKLNSFITQYSTGQVSVEIEWELQKENSKRWNPEIQYTSNYYKSTNVDFAVNTEGVYSEPRPIGTRYLTRNL

SEQ ID NO: 5032 - DNA, 2217 bp, Adeno-associated virus
  source 1..2217: mol_type = genomic DNA
atggctgccgatggttatcttccagattggctcgaggacaacctctctgagggcattcgcgagtggtgggacctgaaacctggagccccgaaacccaaggccaaccagcaaaagcaggacgacggccggggtctggtgcttcctggctacaagtacctcggacccttcaacggactcgacaagggggagcccgtcaacgcggcggacgcagcggccctcgagcacgacaaggcctacgaccagcagctcaaagcgggtgacaatccgtacctgcggtataatcacgccgacgccgagtttcaggagcgtctgcaagaagatacgtcttttgggggcaacctcgggcgagcagtcttccaggccaagaagcgggttctcgaacctctcggtctggttgaggaaggcgctaagacggctcctggaaagaagagaccggtagagccgtcaccacagcgttcccccgactcctccacgggcatcggcaagaaaggccagcagcccgccagaaagagactcaatttcggtcagactggcgactcagagtcagtccccgaccctcaacctatcggagaacctccagcagcgccctctagtgtgggatctggtacaatggctgcaggcggtggcgcaccaatggcagacaataacgaaggtgccgacggagtgggtagttcctcgggaaattggcattgcgattccacatggctgggcgacagagtcatcaccaccagcacccgaacctgggccctgcccacctacaacaaccacctctacaagcaaatctccaacgggacctcgggaggcagcaccaacgacaacacctactttggctacagcaccccctgggggtattttgactttaacagattccactgccacttctcaccacgtgactggcagcgacccatcaacaacaactggggattccggcccaagagactcagcttcaagctcttcaacatccaggtcaaagaggtcacgcagaatgaaggcaccaagaccatcgccaataacctcaccagcaccatccaggtgtttacggactcggaataccagctgccgtacgtcctcggctctgcccaccagggctgcctgcctccgttcccggcggacgtcttcatgattcctcagtacggctacctgactctcaacaacggtagtcaggccgtgggacgttcctccttctactgcctggagtacttcccctctcagatgctgagaacgggcaacaacttttccttcagctaccctttcgaggacgtgcctttccacagcagctacgcgcacagccagagtttggacaggctgatgaatcctctcatcgaccagtacctgtactacctgtcaagaacccagtctacgggaggcacagcgggaacccagcagttgctgttttctcaggccgggcctagcaacatgtcggctcaggccagaaactggctgcctggaccctgctacagacagcagcgcgtctccacgacactgtcgcaaaacaacaacagcaactttgcctggactggtgccaccaagtatcatctgaacggcagagactctctggtgaatccgggcgtcgccatggcaaccaacaaggacgacgaggaccgcttcttcccatccagcggcatcctcatgtttggcaagcagggagctggaaaagacaacgtggactatagcaacgtgatgctaaccagcgaggaagaaatcaagaccaccaaccccgtggccacagaacagtatggcgtggtggctgataacctacagcagcaagacaccgctcctattgtgggggccgtcaacagccagggagccttacctggcatggtctggcagaaccgggacgtgtacctgcagggtcctatttgggccaagattcctcacacagatggcaactttcacccgtctcctttaatgggcggctttggacttaaacatccgcctcctcaggtcctcatcaaaaacactcctgttcctgcggatcctccaacagcgttcaaccaggccaagctgaattctttcatcacgcagtacagcaccggacaagtcagcgtggagatcgagtgggagctgcagaaggagaacagcaagcgctggaacccagagattcagtatacttccaactactacaaatctacaaatgtggactttgctgttaatactgagggtgtttactctgagcctcgccccattggcactcgttacctcacccgtaatctgtaa

SEQ ID NO: 5033 - DNA, 2214 bp, Adeno-associated virus
  source 1..2214: mol_type = genomic DNA
atggctgctgacggttatcttccagattggctcgaggacaacctctctgagggcattcgcgagtggtgggacctgaaacctggagcccccaagcccaaggccaaccagcagaagcaggacgacggccggggtctggtgcttcctggctacaagtacctcggacccttcaacggactcgacaagggggagcccgtcaacgcggcggacgcagcggccctcgagcacgacaaggcctacgaccagcagctcaaagcgggtgacaatccgtacctgcggtataaccacgccgacgccgagttccaggagcgtctgcaagaagatacgtcttttgggggcaacctcgggcgagcagtcttccaggccaagaagcgggttctcgaacctctcggtctggctgaggaagctgctaagacggctcctggaaagaagagaccggtagaaccgtcacctcagcgttcccccgactcctccacgggcatcggcaagaaaggccagcagcccgctagaaagagactgaactttgggcagactggcgactcagagtcagtccccgaccctcaaccaatcggagagccaccagcaggcccctctggtctgggatctggtacaatggctgcaggcggtggcgcaccaatggctgacaataacaagggcgccgacggagtgggtaatgcctcaggaaattggcattgcgattccacatggctgggcgacagagtcatcaccaccagcacccgaacctgggctttgcccacctacaacaaccacctctacaagcaaatctccagtcagtcagcaggtagcaccaacgacaacgtctacttcggctacagcaccccctgggggtattttgacttcaacagattccactgtcacttctcaccacgtgactggcagcggctcatcaacaacaactggggattccggcccaagaagctcaacttcaagctgttcaacatccaggtcaaggaggtcacaacgggtgacggcgtcacgaccatcgccaataaccttaccagcacggttcaggtcttttcggactcggaataccagctgccctacgtcctcggctccgcacaccagggctgcctgcctccgttcccggcggacgtcttcatgattccccagtacggctacctgactctgaacaatgacagccaatcggtgggtcgttcctctttctactgcctggaatatttcccttctcaaatgctgagaacgggcaacaacttcaccttcagctacaccttcgaggacgttcccttccacagcagctacgcacacagccagagcctggaccggctgatgaatcctcttatcgaccagtacctgtattacctggccagaacacagagcaacgcaggaggcacagctggcaatcgggaactgcagttttatcagggcgggcctaccaccatggccgaacaagccaaaaactggctgcctggaccttgcttccggcaacaaagagtctccaagacgctggatcaaaacaacaacagcaactttgcttggactggtgccaccaaataccatctaaatggaagaaattcattggttaatcccggtgtcgccatggcaacccacaaggacgacgaggaacgcttcttcccttcgagcggagtcctgatttttggaaaaactggagcagctaataagactacactggaaaatgtgttaatgacaaatgaagaggaaattcgtcctaccaacccggtagccaccgaggaatacgggactgttagcagcaacctgcaggcggctaacactgcagcccagacacaagttgtcaacaaccagggagccttacctggtatggtctggcagaaccgggacgtgtacctgcagggtcccatctgggccaagattcctcacacggacggcaactttcacccgtctccgctgatgggcggctttggactgaagcatccgcctcctcagatcctgatcaaaaacactcctgttcctgctaatcccccggaggtgtttacgcctgccaagtttgcttctttcatcacacagtacagcaccggccaggtcagcgtggagatcgagtgggagctgcagaaggagaacagcaagcgctggaacccagagattcagtatacctccaattttgacaaacagactggtgtggactttgccgttgacagccagggtgtttattctgagcctcgccccattggtactcgttacctcacccgtaatctgtaa

SEQ ID NO: 5034 - protein, 737 aa, Adeno-associated virus
MAADGYLPDWLEDNLSEGIREWWDLKPGAPKPKANQQKQDDGRGLVLPGYKYLGPFNGLDKGEPVNAADAAALEHDKAYDQQLKAGDNPYLRYNHADAEFQERLQEDTSFGGNLGRAVFQAKKRVLEPLGLAEEAAKTAPGKKRPVEPSPQRSPDSSTGIGKKGQQPARKRLNFGQTGDSESVPDPQPIGEPPAGPSGLGSGTMAAGGGAPMADNNKGADGVGNASGNWHCDSTWLGDRVITTSTRTWALPTYNNHLYKQISSQSAGSTNDNVYFGYSTPWGYFDFNRFHCHFSPRDWQRLINNNWGFRPKKLNFKLFNIQVKEVTTGDGVTTIANNLTSTVQVFSDSEYQLPYVLGSAHQGCLPPFPADVFMIPQYGYLTLNNDSQSVGRSSFYCLEYFPSQMLRTGNNFTFSYTFEDVPFHSSYAHSQSLDRLMNPLIDQYLYYLARTQSNAGGTAGNRELQFYQGGPTTMAEQAKNWLPGPCFRQQRVSKTLDQNNNSNFAWTGATKYHLNGRNSLVNPGVAMATHKDDEERFFPSSGVLIFGKTGAANKTTLENVLMTNEEEIRPTNPVATEEYGTVSSNLQAANTAAQTQVVNNQGALPGMVWQNRDVYLQGPIWAKIPHTDGNFHPSPLMGGFGLKHPPPQILIKNTPVPANPPEVFTPAKFASFITQYSTGQVSVEIEWELQKENSKRWNPEIQYTSNFDKQTGVDFAVDSQGVYSEPRPIGTRYLTRNL

SEQ ID NO: 5035 - DNA, 2217 bp, Adeno-associated virus
  source 1..2217: mol_type = genomic DNA
atggctgccgatggttatcttccagattggctcgaggacaacctctctgagggcattcgcgagtggtgggacctgaaacctggagccccgaaacccaaagccaaccagcaaaagcaggacgacggccggggtctggtgcttcctggctacaagtacctcggacccttcaacggactcgacaagggggagcccgtcaacgcggcggacgcagcggccctcgagcacgacaaggcctacgaccagcagctcaaagcgggtgacaatccgtacctgcggtataatcacgccgacgccgagtttcaggagcgtctgcaagaagatacgtcttttgggggcaacctcgggcgagcagtcttccaggccaagaagcgggttctcgaacctctcggtctggttgaggaaggcgctaagacggctcctggaaagaagagaccggtagagccgtcaccacagcgttcccccgactcctccacgggcatcggcaagaaaggccagcagcccgccagaaagagactcaatttcggtcagactggcgactcagagtcagtccccgaccctcaacctatcggagaacctccagcagcgccctctagtgtgggatctggtacaatggctgcaggcggtggcgcaccaatggcagacaataacgaaggtgccgacggagtgggtagttcctcgggaaattggcattgcgattccacatggctgggcgacagagtcatcaccaccagcacccgaacctgggccctgcccacctacaacaaccacctctacaagcaaatctccaacgggacctcgggaggcagcaccaacgacaacacctactttggctacagcaccccctgggggtattttgactttaacagattccactgccacttctcaccacgtgactggcagcgactcatcaacaacaactggggattccggcccaagagactcagcttcaagctcttcaacatccaggtcaaagaggtcacgcagaatgaaggcaccaagaccatcgccaataacctcaccagcaccatccaggtgtttacggactcggaataccagctgccgtacgtcctcggctctgcccaccagggctgcctgcctccgttcccggcggacgtcttcatgattcctcagtacggctacctgactctcaacaacggtagtcaggccgtgggacgttcctccttctactgcctggagtacttcccctctcagatgctgagaacgggcaacaacttttccttcagctacactttcgaggacgtgcctttccacagcagctacgcgcacagccagagtttggacaggctgatgaatcctctcatcgaccagtacctgtactacctgtcaagaacccagtctacgggaggcacagcgggaacccagcagttgctgttttctcaggccgggcctagcaacatgtcggctcaggccagaaactggctgcctggaccctgctacagacagcagcgcgtctccacgacactgtcgcaaaacaacaacagcaactttgcctggactggtgccaccaagtatcatctgaacggcagagactctctggtgaatccgggcgtcgccatggcaaccaacaaggacgacgaggaccgcttcttcccatccagcggcatcctcatgtttggcaagcagggagctggaaaagacaacgtggactatagcaacgtgatgctaaccagcgaggaagaaatcaagaccaccaaccccgtggccacagaacagtatggcgtggtggctgataacctacagcagcaaaacaccgctcctattgtgggggccgtcaacagccagggagccttacctggcatggtctggcagaaccgggacgtgtacctgcagggtcctatttgggccaagattcctcacacagatggcaactttcacccgtctcctttaatgggcggctttggacttaaacatccgcctcctcagatcctcatcaaaaacactcctgttcctgcggatcctccaacagcgttcaaccaggccaagctgaattctttcatcacgcagtacagcaccggacaagtcagcgtggagatcgtgtgggagctgcagaaggagaacagcaagcgcaggaacccagagattcagtatacttccaactactacaaatctacaaatgtggactttgctgttaatactgagggtgtttactctgagcctcgccccattggcactcgttacctcacccgtaatctgtaa

SEQ ID NO: 5036 - protein, 738 aa, Adeno-associated virus
MAADGYLPDWLEDNLSEGIREWWDLKPGAPKPKANQQKQDDGRGLVLPGYKYLGPFNGLDKGEPVNAADAAALEHDKAYDQQLKAGDNPYLRYNHADAEFQERLQEDTSFGGNLGRAVFQAKKRVLEPLGLVEEGAKTAPGKKRPVEPSPQRSPDSSTGIGKKGQQPARKRLNFGQTGDSESVPDPQPIGEPPAAPSSVGSGTMAAGGGAPMADNNEGADGVGSSSGNWHCDSTWLGDRVITTSTRTWALPTYNNHLYKQISNGTSGGSTNDNTYFGYSTPWGYFDFNRFHCHFSPRDWQRLINNNWGFRPKRLSFKLFNIQVKEVTQNEGTKTIANNLTSTIQVFTDSEYQLPYVLGSAHQGCLPPFPADVFMIPQYGYLTLNNGSQAVGRSSFYCLEYFPSQMLRTGNNFSFSYTFEDVPFHSSYAHSQSLDRLMNPLIDQYLYYLSRTQSTGGTAGTQQLLFSQAGPSNMSAQARNWLPGPCYRQQRVSTTLSQNNNSNFAWTGATKYHLNGRDSLVNPGVAMATNKDDEDRFFPSSGILMFGKQGAGKDNVDYSNVMLTSEEEIKTTNPVATEQYGVVADNLQQQNTAPIVGAVNSQGALPGMVWQNRDVYLQGPIWAKIPHTDGNFHPSPLMGGFGLKHPPPQILIKNTPVPADPPTAFNQAKLNSFITQYSTGQVSVEIVWELQKENSKRRNPEIQYTSNYYKSTNVDFAVNTEGVYSEPRPIGTRYLTRNL

SEQ ID NO: 5037 - protein, 738 aa, Adeno-associated virus
MAADGYLPDWLEDNLSEGIREWWDLKPGAPKPKANQQKQDDGRGLVLPGYKYLGPFNGLDKGEPVNAADAAALEHDKAYDQQLKAGDNPYLRYNHADAEFQERLQEDTSFGGNLGRAVFQAKKRVLEPLGLVEEGAKTAPGKKRPVEPSPQRSPDSSTGIGKKGQQPARKRLNFGQTGDSESVPDPQPIGEPPAAPSSVGSGTMAAGGGAPMADNNEGADGVGSSSGNWHCDSTWLGDRVITTSTRTWALPTYNNHLYKQISNGTSGGSTNDNTYFGYSTPWGYFDFNRFHCHFSPRDWQRLINNNWGFRPKRLSFKLFNIQVKEVTQNEGTKTIANNLTSTIQVFTDSEYQLPYVLGSAHQGCLPPFPADVFMIPQYGYLTLNNGSQAVGRSSFYCLEYFPSQMLRTGNNFSFSYTFEDVPFHSSYAHSQSLDRLMNPLIDQYLYYLSRTQSTGGTAGTQQLLFSQAGPSNMSAQARNWLPGPCYRQQRVSTTLSQNNNSNFAWTGATKYHLNGRDSLVNPGVAMATNKDDEDRFFPSSGILMFGKQGAGKDNVDYSNVMLTSEEEIKTTNPVATEQYGVVADNLQQQNTAPIVGAVNSQGALPGMVWQNRDVYLQGPIWAKIPHTDGNFHPSPLMGGFGLKHPPPQILIKNTPVPADPPTAFNQAKLNSFITQYSTGQVSVEIEWELQKENSKRWNPEIQYTSNYYKSTNVDFAVNTEGVYSEPRPIGTRYLTRNL

SEQ ID NO: 5038 - protein, 738 aa, Adeno-associated virus
MAADGYLPDWLEDNLSEGIREWWDLKPGAPKPKANQQKQDDGRGLVLPGYKYLGPFNGLDKGEPVNAADAAALEHDKAYDQQLKAGDNPYLRYNHADAEFQERLQEDTSFGGNLGRAVFQAKKRVLEPLGLVEEGAKTAPGKKRPVEPSPQRSPDSSTGIGKKGQQPARKRLNFGQTGDSESVPDPQPIGEPPAAPSSVGSGTMAAGGGAPMADNNEGADGVGSSSGNWHCDSTWLGDRVITTSTRTWALPTYNNHLYKQISNGTSGGSTNDNTYFGYSTPWGYFDFNRFHCHFSPRDWQRLINNNWGFRPKRLSFKLFNIQVKEVTQNEGTKTIANNLTSTIQVFTDSEYQLPYVLGSAHQGCLPPFPADVFMIPQYGYLTLNNGSQAVGRSSFYCLEYFPSQMLRTGNNFSFSYTFEDVPFHSSYAHSQSLDRLMNPLIDQYLYYLSRTQSTGGTAGTQQLLFSQAGPSNMSAQARNWLPGPCYRQQRVSTTLSQNNNSNFAWTGATKYHLNGRDSLVNPGVAMATNKDDEDRFFPSSGILMFGKQGAGKDNVDYSNVMLTSEEEIKTTNPVATEQYGVVADNLQQQNTAPIVGAVNSQGALPGMVWQNRDVYLQGPIWAKIPHTDGNFHPSPLMGGFGLKHPPPQILIKNTPVPADPPTAFNQAKLNSFITQYSTGQVSVEIVWELQKENSKRWNPEIQYTSNYYKSTNVDFAVNTEGVYSEPRPIGTRYLTRNL

SEQ ID NO: 5039 - protein, 738 aa, Adeno-associated virus; identical to SEQ ID NO: 5037

SEQ ID NO: 5040 - DNA, 2214 bp, Adeno-associated virus
  source 1..2214: mol_type = genomic DNA
atggctgctgacggttatcttccagattggctcgaggacaacctctctgagggcattcgcgagtggtgggacctgaaacctggagcccccaagcccaaggccaaccagcagaagcaggacgacggccggggtctggtgcttcctggctacaagtacctcggacccttcaacggactcgacaagggggagcccgtcaacgcggcggacgcagcggccctcgagcacgacaaggcctacgaccagcagctcaaagcgggtgacaatccgtacctgcggtataaccacgccgacgccgagtttcaggagcgtctgcaagaagatacgtcttttgggggcaacctcgggcgagcagtcttccaggccaagaagcgggttctcgaacctctcggtctggttgaggaagctgctaagacggctcctggaaagaagagaccggtagaaccgtcacctcagcgttcccccgactcctccacgggcatcggcaagaaaggccagcagcccgctagaaagagactgaactttgggcagactggcgactcagagtcagtccccgaccctcaaccaatcggagaaccaccagcaggcccctctggtctgggatctggtacaatggctgcaggcggtggcgctccaatggcagacaataacgaaggcgccgacggagtgggtaatgcctcaggaaattggcattgcgattccacatggctgggcgacagagtcatcaccaccagcacccgaacctgggctttgcccacctacaacaaccacctctacaagcaaatctccagtcagtcagcaggtagcaccaacgacaacgtctacttcggctacagcaccccctgggggtattttgacttcaacagattccactgtcacttctcaccacgtgactggcagcggctcatcaacaacaactggggattccggcccaagaagctcaacttcaagctgttcaacatccaggtcaaggaggtcacaacgaatgacggcgtcacgaccatcgccaataaccttaccagcacggttcaggtcttttcggactcggaataccagctgccctacgtcctcggctccgcacaccagggctgcctgcctccgttcccggcggacgtcttcatgattccccagtacggctacctgactctgaacaatggcagccaatcggtgggtcgttcctctttctactgcctggaatatttcccttctcaaatgctgagaacgggcaacaacttcaccttcagctacaccttcgaggacgttcccttccacagcagctacgcacacagccagagcctggaccggctgatgaatcctcttatcgaccagtacctgtattacctggccagaacacagagcaacgcaggaggcacagctggcaatcgggaactgcagttttatcagggcgggcctaccaccatggccgaacaagccaaaaactggctgcctagaccttgcttccggcaacaaagagtctccaagacgctggatcaaaacaacaacagcaactttgcttggactggtgccaccaaataccatctaaatggaagaaattcattggttaatcccggtgtcgccatggcaacccacaaggacgacgaggaacgcttcttcccttcgagcggagtcctgatttttggaaaaactggagcagctaataagactacactggaaaatgtgttaatgacaaatgaagaggaaattcgtcctaccaacccggtagccaccgaggaatacgggactgttagcagcaacctgcaggcggctaacactgcagcccagacacaagttgtcaacaaccagggagccttacctggtatggtctggcagaaccgggacgtgtacctgcagggtcccatctgggccaagattcctcacacggacggcaactttcacccgtctccgctgatgggcggctttggactgaagcatccgcctcctcagatcctgatcaaaaacactcctgttcctgctaatcccccggaggtgtttacgcctgccaagtttgcttctttcatcacacagtacagcaccggccaggtcagcgtggagatcgagtgggagctgcagaaggagaacagcaagcgctggaacccagagattcagtatacctccaattttgacaaacagactggtgtggactttgccgttgacagccagggtgtttattctgagcctcgccccattggtactcgttacctcacccgtaatctgtaa

SEQ ID NO: 5041 - protein, 737 aa, Adeno-associated virus
MAADGYLPDWLEDNLSEGIREWWDLKPGAPKPKANQQKQDDGRGLVLPGYKYLGPFNGLDKGEPVNAADAAALEHDKAYDQQLKAGDNPYLRYNHADAEFQERLQEDTSFGGNLGRAVFQAKKRVLEPLGLVEEAAKTAPGKKRPVEPSPQRSPDSSTGIGKKGQQPARKRLNFGQTGDSESVPDPQPIGEPPAGPSGLGSGTMAAGGGAPMADNNEGADGVGNASGNWHCDSTWLGDRVITTSTRTWALPTYNNHLYKQISSQSAGSTNDNVYFGYSTPWGYFDFNRFHCHFSPRDWQRLINNNWGFRPKKLNFKLFNIQVKEVTTNDGVTTIANNLTSTVQVFSDSEYQLPYVLGSAHQGCLPPFPADVFMIPQYGYLTLNNGSQSVGRSSFYCLEYFPSQMLRTGNNFTFSYTFEDVPFHSSYAHSQSLDRLMNPLIDQYLYYLARTQSNAGGTAGNRELQFYQGGPTTMAEQAKNWLPRPCFRQQRVSKTLDQNNNSNFAWTGATKYHLNGRNSLVNPGVAMATHKDDEERFFPSSGVLIFGKTGAANKTTLENVLMTNEEEIRPTNPVATEEYGTVSSNLQAANTAAQTQVVNNQGALPGMVWQNRDVYLQGPIWAKIPHTDGNFHPSPLMGGFGLKHPPPQILIKNTPVPANPPEVFTPAKFASFITQYSTGQVSVEIEWELQKENSKRWNPEIQYTSNFDKQTGVDFAVDSQGVYSEPRPIGTRYLTRNL

SEQ ID NO: 5042 - DNA, 2214 bp, Adeno-associated virus
  source 1..2214: mol_type = genomic DNA
atggctgctgacggttatcttccagattggctcgaggacaacctctctgagggcattcgcgagtggtgggacctgaaacctggagcccccaagcccaaggccaaccagcagaagcaggacgacggccggggtctggtgcttcctggctacaagtacctcggacccttcaacggactcgacaagggggagcccgtcaacgcggcggacgcagcggccctcgagcacgacaaggcctacgaccagcagctcaaagcgggtgacaatccgtacctgcggtataaccatgccgacgccgagtttcaggagcgtctgcaagaagatacgtcttttgggggcaacctcgggcgagcagtcctccaggccaagaagcgggttctcgaacctctcggtctggttgaggaagctgctaagacggctcctggaaagaagagaccggtagaaccgtcacctcagcgttcccccgactcctccacgggcatcggcaagaaaggccagcagcccgctagaaagagactgaactttgggcagactggcgactcagagtcagtccccgaccctcaaccaatcggagaaccaccagcaggcccctctggtctgggatctggtacaatggctgcaggcggtggcgctccaatggcagacaataacgaaggcgccgacggagtgggtaatgcctcaggaaattggcattgcgattccacatggctgggcgacagagtcatcaccaccagcacccgaacctgggctttgcccacctacaacaaccacctctacaagcaaatctccagtcagtcagcaggtagcaccaacgacaacgtctacttcggctacagcaccccctgggggtattttgacttcaacagattccactgtcacttctcaccacgtgactggcagcggctcatcaacaacaactggggattccggcccaagaagctcaacttcaagctgttcaacatccaggtcaaggaggtcacaacgaatgacggcgtcacgaccatcgccaataaccttaccagcacggttcaggtcttttcggactcggaataccagctgccctacgtcctcggctccgcacaccagggctgcctgcctccgttcccggcggacgtcttcatgattccccagtacggctacctgactctgaacaatggcagccaatcggtgggtcgttcctctttctactgcctggaatatttcccttctcaaatgctgagaacgggcaacaacttcaccttcagctacaccttcgaggacgttcccttccacagcagctacgcacacagccagagcctggaccggctgatgaatcctcttatcgaccagtacctgtattacctggccagaacacagagcaacgcaggaggcacagctggcaatcgggaactgcagttttatcagggcgggcctaccaccatggccgaacaagccaaaaactggctgcctggaccttgcttccggcaacaaagagtctccaagacgctggatcaaaacaacaacagcaactttgcttggactggtgccaccaaataccatctaaatggaagaaattcattggttaatcccggtgtcgccatggcaacccacaaggacgacgaggaacgcttcttcccttcgagcggagtcctgatttttggaaaaactggagcagctaataagactacactggaaaatgtgttaatgacaaatgaagaggaaattcgtcctaccaacccggtagccaccgaggaatacgggactgttagcagcaacctgcaggcggctaacactgcagcccagacacaagttgtcaacaaccagggagccttacctggtatggtctggcagaaccgggacgtgtacctgcagggtcccatctgggccaagattcctcacacggacggcaactttcacccgtctccgctgatgggcggctttggactgaagcatccgcctcctcagatcctgatcaaaaacactcctgttcctgctaatcccccggaggtgtttacgcctgccaagtttgcttctttcatcacacagtacagcaccggccaggtcagcgtggagatcgagtgggagctgcagaaggagaacagcaagcgctggaacccagagattcagtatacctccaattttgacaaacagactggtgtggactttgccgttgacagccagggtgtttattctgagcctcgccccattggtactcgttacctcacccgtaatctgtaa

SEQ ID NO: 5043 - protein, 737 aa, Adeno-associated virus; identical to SEQ ID NO: 5003

SEQ ID NO: 5044 - protein, 737 aa, Adeno-associated virus
MAADGYLPDWLEDNLSEGIREWWDLKPGAPKPKANQQKQDDGRGLVLPGYKYLGPFNGLDKGEPVNAADAAALEHDKAYDQQLKAGDNPYLRYNHADAEFQERLQEDTSFGGNLGRAVLQAKKRVLEPLGLVEEAAKTAPGKKRPVEPSPQRSPDSSTGIGKKGQQPARKRLNFGQTGDSESVPDPQPIGEPPAGPSGLGSGTMAAGGGAPMADNNEGADGVGNASGNWHCDSTWLGDRVITTSTRTWALPTYNNHLYKQISSQSAGSTNDNVYFGYSTPWGYFDFNRFHCHFSPRDWQRLINNNWGFRPKKLNFKLFNIQVKEVTTNDGVTTIANNLTSTVQVFSDSEYQLPYVLGSAHQGCLPPFPADVFMIPQYGYLTLNNGSQSVGRSSFYCLEYFPSQMLRTGNNFTFSYTFEDVPFHSSYAHSQSLDRLMNPLIDQYLYYLARTQSNAGGTAGNRELQFYQGGPTTMAEQAKNWLPGPCFRQQRVSKTLDQNNNSNFAWTGATKYHLNGRNSLVNPGVAMATHKDDEERFFPSSGVLIFGKTGAANKTTLENVLMTNEEEIRPTNPVATEEYGTVSSNLQAANTAAQTQVVNNQGALPGMVWQNRDVYLQGPIWAKIPHTDGNFHPSPLMGGFGLKHPPPQILIKNTPVPANPPEVFTPAKFASFITQYSTGQVSVEIEWELQKENSKRWNPEIQYTSNFDKQTGVDFAVDSQGVYSEPRPIGTRYLTRNL

SEQ ID NO: 5045 - DNA, 2217 bp, Adeno-associated virus
  source 1..2217: mol_type = genomic DNA
atggctgccgatggttatcttccagattggctcgaggacaacctctctgagggcattcgcgagtggtgggacctgaaacctggagccccgaaacccaaagccaaccagcaaaagcaggacgacggccggggtctggtgcttcctggctacaagtacctcggacccttcaacggactcgacaagggggagcccgtcaacgcggcggacgcagcggccctcgagcacgacaaggcctacgaccagcagctcaaagcgggtgacaatccgtacctgcggtataatcacgccgacgccgagtttcaggagcgtctgcaagaagatacgtcttttgggggcaacctcgggcgagcagtcttccaggccaagaagcgggttctcgaacctctcggtctggttgaggaaggcgctaagacggctcctggaaagaagagaccggtagagccgtcaccacagcgttcccccgactcctccacgggcatcggcaagaaaggccagcagcccgccagaaagagactcaatttcggtcagactggcgactcagagtcagtccccgaccctcaacctatcggagaacctccagcagcgccctctagtgtgggatctggtacaatggctgcaggcggtggcgcaccaatggcagacaataacgaaggtgccgacggagtgggtagttcctcgggaaattggcattgcgattccacatggctgggcgacagagtcatcaccaccagcacccgaacctgggccctgcccacctacaacaaccacctctacaagcaaatctccaacgggacctcgggaggcagcaccaacgacaacacctactttggctacagcaccccctgggggtattttgactttaacagattccactgccacttctcaccacgtgactggcagcgactcatcaacaacaactggggattccggcccaagagactcagcttcaagctcttcaacatccaggtcaaagaggtcacgcagaatgaaggcaccaagaccatcgccaataacctcaccagcaccatccaggtgtttacggactcggaataccagctgccgtacgtcctcggctctgcccaccagggctgcctgcctccgttcccggcggacgtcttcatgattcctcagtacggctacctgactctcaacaacggtagtcaggccgtgggacgttcctccttctactgcctggagtacttcccctctcagatgctgagaacgggcaacaacttttccttcagctacactttcgaggacgtgcctttccacagcagctacgcgcacagccagagtttggacaggctgatgaatcctctcatcgaccagtacctgtactacctgtcaagaacccagtctacgggaggcacagcgggaacccagcagttgctgttttctcaggccgggcctagcaacatgtcggctcaggccagaaactggctgcctggaccctgctacagacagcagcgcgtctccacgacactgtcgcaaaacaacaacagcaactttgcctggactggtgccaccaagtatcatctgaacggcagagactctctggtgaatccgggcgtcgccatggcaaccaacaaggacgacgaggaccgcttcttcccacccagcggcatcctcatgtttggcaagcagggagctggaaaagacaacgtggactatagcaacgtgatgctaaccagcgaggaagaaatcaagaccaccaaccccgtggccacagaacagtatggcgtggtggctgataacctacagcagcaaaacaccgctcctattgtgggggccgtcaacagccagggagccttacctggcatggtctggcagaaccgggacgtgtacctgcagggtcctatttgggccaagattcctcacacagatggcaactttcacccgtctcctttaatgggcggctttggacttaaacatccgcctcctcagatcctcatcaaaaacactcctgttcctgcggatcctccaacagcgttcaaccaggccaagctgaattctttcatcacgcagtacagcaccggacaagtcagcgtggtgatcgagtgggagctgcagaaggagaacagcaagcgctggaacccagagattcagtatacttccaactactacaaatctacaaatgtggactttgctgttaatactgagggtgtttactctgagcttcgccccattggcactcgttacctcacccgtaatctgtaa

SEQ ID NO: 5046 - protein, 738 aa, Adeno-associated virus
MAADGYLPDWLEDNLSEGIREWWDLKPGAPKPKANQQKQDDGRGLVLPGYKYLGPFNGLDKGEPVNAADAAALEHDKAYDQQLKAGDNPYLRYNHADAEFQERLQEDTSFGGNLGRAVFQAKKRVLEPLGLVEEGAKTAPGKKRPVEPSPQRSPDSSTGIGKKGQQPARKRLNFGQTGDSESVPDPQPIGEPPAAPSSVGSGTMAAGGGAPMADNNEGADGVGSSSGNWHCDSTWLGDRVITTSTRTWALPTYNNHLYKQISNGTSGGSTNDNTYFGYSTPWGYFDFNRFHCHFSPRDWQRLINNNWGFRPKRLSFKLFNIQVKEVTQNEGTKTIANNLTSTIQVFTDSEYQLPYVLGSAHQGCLPPFPADVFMIPQYGYLTLNNGSQAVGRSSFYCLEYFPSQMLRTGNNFSFSYTFEDVPFHSSYAHSQSLDRLMNPLIDQYLYYLSRTQSTGGTAGTQQLLFSQAGPSNMSAQARNWLPGPCYRQQRVSTTLSQNNNSNFAWTGATKYHLNGRDSLVNPGVAMATNKDDEDRFFPPSGILMFGKQGAGKDNVDYSNVMLTSEEEIKTTNPVATEQYGVVADNLQQQNTAPIVGAVNSQGALPGMVWQNRDVYLQGPIWAKIPHTDGNFHPSPLMGGFGLKHPPPQILIKNTPVPADPPTAFNQAKLNSFITQYSTGQVSVVIEWELQKENSKRWNPEIQYTSNYYKSTNVDFAVNTEGVYSELRPIGTRYLTRNL

SEQ ID NO: 5047 - DNA, 2214 bp, Adeno-associated virus
  source 1..2214: mol_type = genomic DNA
atggctgctgacggttatcttccagattggctcgaggacaacctctctgagggcattcgcgagtggtgggacctgaaacctggagcccccaagcccaaggccaaccagcagaagcaggacgacggccggggtctggtgcttcctggctacaagtacctcggacccttcaacggactcgacaagggggagcccgtcaacgcggcggacgcagcggccctcgagcacgacaaggcctacgaccagcagctcaaagcgggtgacaatccgtacctgcggtataaccacgccgacgccgagtttcaggagcgtctgcaagaagatacgtcttttgggggcaacctcgggcgagcagtcttccaggccaagaagcgggttctcgaacctctcggtctggttgaggaagctgctaagacggctcctggaaagaagagaccggtagaaccgtcacctcagcgttcccccgactcctccacgggcatcggcaagaaaggccagcagcccgctagaaagagactgaactttgggcagactggcgactcagagtcagtccccgaccctcaaccaatcggagaaccaccagcaggcccctctggtctgggatctggtacaatggctgcaggcggtggcgccccaatggcagacaataacgaaggcgccgacggagtgggtaatgcctcaggaaattggcattgcgattccacatggctgggcgacagagtcatcaccaccagcacccgaacctgggctttgcccacctacaacaaccacctctacaagcaaatctccagtcagtcagcaggtagcaccaacgacaacgtctacttcggctacagcaccccctgggggtattttgacttcaacagattccactgtcacttctcaccacgtgactggcagcggctcatcaacaacaactggggattccggcccaagaagctcaacttcaagctgttcaacatccaggtcaaggaggtcacaacgaatgacggcgtcacgaccatcgccaataaccttaccagcacggttcaggtcttttcggactcggaataccagctgccctacgtcctcggctccgcacaccagggctgcctgcctccgttcccggcggacgtcttcatgattccccagtacggctacctgactctgaacaatggcagccaatcggtgggtcgttcctctttctactgcctggaatatttcccttctcaaatgctgagaacgggcaacaacttcaccatcagctacaccttcgaggacgttcccttccacagcagctacgcacacagccagagcctggaccggctgatgaatcctcttatcgaccagtacctgtattacctggccagaacacagagcaacgcaggaggcacagctggcaatcaggaactgcagttttatcagggcgggcctaccaccatggccgaacaagccaaaaactggctgcctggaccttgcttccggcaacaaagagtctccaagacgctggatcaaaacaacaacagcaactttgcttggactggtgccaccaaataccatctaaatggaagaaattcattggttaatcccggtgtcgccatggcaacccacaaggacgacgaggaacgcttcttcccttcgagcggagtcctgatttttggaaaaactggagcagctaataagactacactggaaaatgtgttaatgacaaatgaagaggaaattcgtcctaccaacccggtagccaccgaggaatacgggactgttagcagcaacctgcaggcggctaacactgcagcccagacacaagttgtcaacaaccagggagccttacctggtatggtctggcagaaccgggacgtgtacctgcagggtcccatctgggccaagattcctcacacagatggcaactttcacccgtctcctttaatgggcggctttggacttaaacatccgcctcctcagatcctcatcaaaaacactcctgttcctgcggatcctccaacagcgttcaaccaggccaagctgaattctttcatcacgcagtacagcaccggacaagtcagcgtggagatcgagtgggagctgcagaaggagaacagcaagcgctggaacccagagattcagtatacttccaactactacaaatctacaaatgtggactttgctgttaatactgagggtgtttactctgagcctcgccccattggcactcgttacctcacccgtaatctgtaa

SEQ ID NO: 5048 - protein, 737 aa, Adeno-associated virus
MAADGYLPDWLEDNLSEGIREWWDLKPGAPKPKANQQKQDDGRGLVLPGYKYLGPFNGLDKGEPVNAADAAALEHDKAYDQQLKAGDNPYLRYNHADAEFQERLQEDTSFGGNLGRAVFQAKKRVLEPLGLVEEAAKTAPGKKRPVEPSPQRSPDSSTGIGKKGQQPARKRLNFGQTGDSESVPDPQPIGEPPAGPSGLGSGTMAAGGGAPMADNNEGADGVGNASGNWHCDSTWLGDRVITTSTRTWALPTYNNHLYKQISSQSAGSTNDNVYFGYSTPWGYFDFNRFHCHFSPRDWQRLINNNWGFRPKKLNFKLFNIQVKEVTTNDGVTTIANNLTSTVQVFSDSEYQLPYVLGSAHQGCLPPFPADVFMIPQYGYLTLNNGSQSVGRSSFYCLEYFPSQMLRTGNNFTISYTFEDVPFHSSYAHSQSLDRLMNPLIDQYLYYLARTQSNAGGTAGNQELQFYQGGPTTMAEQAKNWLPGPCFRQQRVSKTLDQNNNSNFAWTGATKYHLNGRNSLVNPGVAMATHKDDEERFFPSSGVLIFGKTGAANKTTLENVLMTNEEEIRPTNPVATEEYGTVSSNLQAANTAAQTQVVNNQGALPGMVWQNRDVYLQGPIWAKIPHTDGNFHPSPLMGGFGLKHPPPQILIKNTPVPADPPTAFNQAKLNSFITQYSTGQVSVEIEWELQKENSKRWNPEIQYTSNYYKSTNVDFAVNTEGVYSEPRPIGTRYLTRNL

SEQ ID NO: 5049 - DNA, 2217 bp, Adeno-associated virus
  source 1..2217: mol_type = genomic DNA
atggctgccgatggttatcttccagattggctcgaggacaacctctctgagggcattcgcgagtggtgggacctgaaacctggagccccgaaacccaaagccaaccagcaaaagcaggacgacggccggggtctggtgcttcctggctacaagtacctcggacccttcaacggactcgacaagggggagcccgtcaacgcggcggacgcagcggccctcgagcacgacaaggcctacgaccagcagctcaaagcgggtgacaatccgtacctgcggtataatcacgccgacgccgagtttcaggagcgtctgcaagaagatacgtcttttgggggcaacctcgggcgagcagtcttccaggccaagaagcgggttctcgaacctctcggtctggttgaggaaggcgctaagacggctcctggaaagaagagaccggtagagccgtcaccacagcgttcccccgactcctccacgggcatcggcaagaaaggccagcagcccgccagaaagagactcaatttcggtcagactggcgactcagagtcagtccccgaccctcaacctatcggagaacctccagcagcgccctctagtgtgggatctggtacaatggctgcaggcggtggcgcaccaatggcagacaataacgaaggtgccgacggagtgggtagttcctcgggaaattggcattgcgattccacatggctgggcgacagagtcatcaccaccagcacccgaacctgggccctgcccgcctacaacaaccacctctacaagcaaatctccaacgggacctcgggaggcagcaccaacgacaacacctactttggctacagcaccccctgggggtattttgactttaacagattccactgccacttctcaccacgtgactggcagcgactcatcaacaacaactggggattccggcccaagagactcagcttcaagctcttcaacatccaggtcaaagaggtcacgcagaatgaaggcaccaagaccatcgccaataacctcaccagcaccatccaggtgtttacggactcggaataccagctgccgtacgtcctcggctctgcccaccagggctgcctgcctccgttcccggcggatgtcttcatgattcctcagtacggctacctgactctcaacaacggtagtcaggccgtgggacgttcctccttctactgcctggagtacttcccctctcagatgctgagaacgggcaacaacttttccttcagctacactttcgaggacgtgcctttccacagcagctacgcgcacagccagagtttggacaggctgatgaatcctctcatcgaccagtacctgtactacctgtcaagaacccagtctacgggaggcacagcgggaacccagcagttgctgttttctcaggccgggcctagcaacatgtcggctcaggccagaaactggctgcctggaccctgctacagacagcagcgcgtctccacgacactgtcgcaaaacaacaacagcaactttgcctggactggtgccaccaagtatcatctgagcggcagagactctctggtgaatccgggcgtcgccatggcaaccaacaaggacgacgaggaccgcttcttcccatccagcggcatcctcatgtttggcaagcagggagctggaaaagacaacgtggactatagcaacgtgatgctaaccagcgaggaagaaatcaagaccaccaaccccgtggccacagaacagtatggcgtggtggctgataacctacagcagcaaaacaccgctcctattgtgggggccgtcaacagccagggagccttacctggcatggtctggcagaaccgggacgtgtacctgcagggtcctatttgggccaagattcctcacacagatggcaactttcacccgtctcctttaatgggcggctttggacttaaacatccgcctcctcagatcctcatcaaaaacactcctgttcctgcggatcctccaacagcgttcaaccaggccaagctgaattcttccatcacgcagtacagcaccggacaagtcagcgtggagatcgagtgggagctgcagaaggagaacagcaagcgctggaacccagagattcagtatacttccaactactacaaatctacaaatgtggactttgctgttaatactgagggtgtttactctgagcctcgccccattggcactcgttacctcacccgtaatttgtaa

SEQ ID NO: 5050 - protein, 738 aa, Adeno-associated virus
MAADGYLPDWLEDNLSEGIREWWDLKPGAPKPKANQQKQDDGRGLVLPGYKYLGPFNGLDKGEPVNAADAAALEHDKAYDQQLKAGDNPYLRYNHADAEFQERLQEDTSFGGNLGRAVFQAKKRVLEPLGLVEEGAKTAPGKKRPVEPSPQRSPDSSTGIGKKGQQPARKRLNFGQTGDSESVPDPQPIGEPPAAPSSVGSGTMAAGGGAPMADNNEGADGVGSSSGNWHCDSTWLGDRVITTSTRTWALPAYNNHLYKQISNGTSGGSTNDNTYFGYSTPWGYFDFNRFHCHFSPRDWQRLINNNWGFRPKRLSFKLFNIQVKEVTQNEGTKTIANNLTSTIQVFTDSEYQLPYVLGSAHQGCLPPFPADVFMIPQYGYLTLNNGSQAVGRSSFYCLEYFPSQMLRTGNNFSFSYTFEDVPFHSSYAHSQSLDRLMNPLIDQYLYYLSRTQSTGGTAGTQQLLFSQAGPSNMSAQARNWLPGPCYRQQRVSTTLSQNNNSNFAWTGATKYHLSGRDSLVNPGVAMATNKDDEDRFFPSSGILMFGKQGAGKDNVDYSNVMLTSEEEIKTTNPVATEQYGVVADNLQQQNTAPIVGAVNSQGALPGMVWQNRDVYLQGPIWAKIPHTDGNFHPSPLMGGFGLKHPPPQILIKNTPVPADPPTAFNQAKLNSSITQYSTGQVSVEIEWELQKENSKRWNPEIQYTSNYYKSTNVDFAVNTEGVYSEPRPIGTRYLTRNL

SEQ ID NO: 5051 - protein, 736 aa, Adeno-associated virus
MAADGYLPDWLEDNLSEGIREWWDLKPGAPKPKANQQKQDDGRGLVLPGYKYLGPFNGLDKGEPVNAADAAALEHDKAYDQQLKAGDNPYLRYNHADAEFQERLQEDTSFGGNLGRAVFQAKKRVLEPLGLVEEGAKTAPGKKRPVEQSPQEPDSSSGIGKTGQQPAKKRLNFGQTGDSESVPDPQPLGEPPATPAAVGPTTMASGGGAPMADNNEGADGVGNASGNWHCDSTWLGDRVITTSTRTWALPTYNNHLYKQISSASTGASNDNHYFGYSTPWGYFDFNRFHCHFSPRDWQRLINNNWGFRPKRLNFKLFNIQVKEVTTNDGVTTIANNLTSTVQVFSDSEYQLPYVLGSAHQGCLPPFPADVFMIPQYGYLTLNNGSQAVGRSSFYCLEYFPSQMLRTGNNFTFSYTFEEVPFHSSYAHSQSLDRLMNPLIDQYLYYLNRTQNQSGSAQNKDLLFSRGSPAGMSVQPKNWLPGPCYRQQRVSKTKTDNNNSNFTWTGASKYNLNGRESIINPGTAMASHKDDEDKFFPMSGVMIFGKESAGASNTALDNVMITDEEEIKATNPVATERFGTVAVNFQSSSTDPATGDVHAMGALPGMVWQDRDVYLQGPIWAKIPHTDGHFHPSPLMGGFGLKNPPPQILIKNTPVPANPPAEFSATKFASFITQYSTGQVSVEIEWELQKENSKRWNPEVQYTSNYAKSANVDFTVDNNGLYTEPRPIGTRYLTRPL

SEQ ID NO: 5052 - DNA, 2217 bp, Adeno-associated virus
  source 1..2217: mol_type = genomic DNA
atggctgctgacggttatcttccagattggctcgaggacaacctctctgagggcattcgcgagtggtgggacctgaaacctggagcccccaagcccaaggccaaccagcagaagcaggacgacggccggggtctggtgcttcctggctacaagtacctcggacccttcaacggactcgacaagggggagcccgtcaacgcggcggacgcagcggccctcgagcacgacaaggcctacgaccagcagctcaaagcgggtgacaatccgtacctgcggtataaccacgccgacgccgagtttcaggagcgtctgcaagaagatacgtcttttgggggcaacctcgggcgagcagtcttccaggccaagaagcgggttctcgaacctctcggtctggttgaggaagctgctaagacggctcctggaaagaagagaccggtagaaccgtcacctcagcgttcccccgactcctccacgggcatcggcaagaaaggccagcagcccgctaaaaagagactgaactttggtcagactggcgactcagagtcagtccccgaccctcaaccaatcggagaaccaccagcaggcccctctggtctgggatctggtacaatggctgcaggcggtggcgctccaatggcagacaataacgaaggcgccgacggagtgggtagttcctcaggaaattggcattgcgattccacatggctgggcgacagagtcatcaccaccagcacccgaacctgggccctgcccacctacaacaaccacctctacaagcaaatatccaatgggacatcgggaggaagcaccaacgacaacacctacttcggctacagcaccccctgggggtattttgacttcaacagattccactgccacttctcaccacgtgactggcagcgactcatcaacaacaactggggattccggccaaaaagactcagcttcaagctcttcaacatccaggtcaaggaggtcacgcagaatgaaggcaccaagaccatcgccaataaccttaccagcacgattcaggtatttacggactcggaataccagctgccgtacgtcctcggctccgcgcaccagggctgcctgcctccgttcccggcggacgtcttcatgattccccagtacggctaccttacactgaacaatggaagtcaagccgtaggccgttcctccttctactgcctggaatattttccatctcaaatgctgcgaactggaaacaattttgaattcagctacaccttcgaggacgtgcctttccacagcagctacgcacacagccagagcttggaccgactgatgaatcctctcatcgaccagtacctgtactacttatccagaactcagtccacaggaggaactcaaggtacccagcaattgttattttctcaagctgggcctgcaaacatgtcggctcaggctaagaactggctacctggaccttgctaccggcagcagcgagtctctacgacactgtcgcaaaacaacaacagcaactttgcttggactggtgccaccaaatatcacctgaacggaagagactctttggtaaatcccggtgtcgccatggcaacccacaaggacgacgaggaacgcttcttcccgtcgagtggagtcctgatgtttggaaaacagggtgctggaagagacaatgtggactacagcagcgttatgctaaccagcgaagaagaaattaaaaccactaaccctgtagccacagaacaatacggtgtggtggctgacaacttgcagcaaaccaatacagggcctattgtgggaaatgtcaacagccaaggagccttacctggcatggtctggcagaaccgagacgtgtacctgcagggtcccatctgggccaagattcctcacacggacggcaacttccacccttcaccgctaatgggaggatttggactgaagcacccacctcctcagatcctgatcaagaacacgccggtacctgcggatcctccaacaacgttcagccaggcgaaattggcttccttcattacgcagtacagcaccggacaggtcagcgtggaaatcgagtgggagctgcagaaggagaacagcaaacgctggaacccagagattcagtacacttcaaactactacaaatctacaaatgtggactttgctgtcaatacagagggaacttattctgagcctcgccccattggtactcgttacctcacccgtaatctgtaa

SEQ ID NO: 5053 - protein, 738 aa, Adeno-associated virus
MAADGYLPDWLEDNLSEGIREWWDLKPGAPKPKANQQKQDDGRGLVLPGYKYLGPFNGLDKGEPVNAADAAALEHDKAYDQQLKAGDNPYLRYNHADAEFQERLQEDTSFGGNLGRAVFQAKKRVLEPLGLVEEGAKTAPGKKRPVEPSPQRSPDSSTGIGKKGQQPARKRLNFGQTGDSESVPDPQPLGEPPAAPSSVGSGTMAAGGGAPMADNNEGADGVGSSSGNWHCDSTWLGDRVITTSTRTWALPTYNNHLYKQISNGTSGGSTNDNTYFGYSTPWGYFDFNRFHCHFSPRDWQRLINNNWGFRPKRLSFKLFNIQVKEVTQNEGTKTIANNLTSTIQVFTDSEYQLPYVLGSAHQGCLPPFPADVFMIPQYGYLTLNNGSQAVGRSSFYCLEYFPSQMLRTGNNFSFSYTFEDVPFHSSYAHSQSLDRLMNPLIDQYLYYLSRTQSTGGTAGTQQLLFSQAGPSNMSAQARNWLPGPCYRQQRVSTTLSQNNNSNFAWTGATKYHLNGRDSLVNPGVAMATNKDDEDRFFPSSGILMFGKQGAGKDNVDYSNVMLTSEEEIKTTNPVATEQYGVVADNLQRQNTAPIVGAVNSQGALPGMVWQNRDVYLQGPIWAKIPHTDGNFHPSPLMGGFGLKHPPPQILIKNTPVPADPPTAFNQAKLNSFITQYSTGQVSVEIEWELQKENSKRWNPEIQYTSNYYKSTNVDFAVNTEGVYSEPRPIGTRYLTRNL

SEQ ID NO: 5054 - protein, 736 aa, Adeno-associated virus
MAADGYLPDWLEDNLSEGIREWLNLKPGAPQPKANQQKQDNARGLVLPGYKYLGPFNGLDKGDPVNEADAAALEHDKAYGQQLKAGDNPYLKYNHADAEFQERLQKDTSFGGNLGKAVFQAKKRILEPLGLVETPAKTAPGKKRPVDPSPQRSPDSSSGIGKKSPHPARKRLNFGQTGEAESVPDPQPIGEPPSDPSSVGSGTMAAGGGAPMADNNEGADGVGNSSGNWHCDSTWLGDRVITTSTRTWALPTYNNHLYKQISSQSGATNDNHYFGYSTPWGYFDFNRFHCHFSPRDWQRLINNNWGFRPKRLSFKLFNIQVKEVTQNDGTTTIANNLTSTVQVFTDSEYQLPYVLGSAHQGCLPPFPADVFMIPQYGYLTLNNGSQAVGRSSFYCLEYFPSQMLRTGNNFQFSYTFEDVPFHSSYAHSQSLDRLMNPLIDQYLYYLSKTQGTNATVQGAKLQFSQAGPSNMRDQARNWLPGPCYRQQRVSKTANDNNNSEYAWTGATKYHLNGRDSLVNPGPAMASHKDDEEKFFPMNGTLVFGKNGAGNSNVDIENVMITDEEEIRTTNPVATEQYGVVSDNLQSSNTRPITGDVDSQGVLPGMVWQDRDVYLQGPIWAKIPHTDGHFHPSPLMGGFGLKHPPPQILIKNTPVPANPATTFTPGKFASFITQYSTGQVSVQIEWELQKENSKRWNPEIQYTSNYNKSVNVDFTVDTNGVYSEPRPIGTRYLTRNL

SEQ ID NO: 5055 - protein, 736 aa, Adeno-associated virus; identical to SEQ ID NO: 4750

SEQ ID NO: 5056 - protein, 736 aa, Adeno-associated virus
MAADGYLPDWLEDNLSEGIREWWDLKPGAPKPKANQQKQDDGRGLVLPGYKYLGPFNGLDKGEPVNAADAAALEHDKAYDQQLKAGDNPYLRYNHADAEFQERLQEDTSFGGNLGRAVFQAKKRVLEPLGLVEEGAKTAPGKKRPVEQSPQEPDSSSGIGKTGQQPAKKRLNFGQTGDSESVPDPQPLGEPPAAPSGLGPNTMASGGGAPMADNNEGADGVGNSSGNWHCDSTWLGDRVITTSTRTWALPTYNNHLYKQISNGTSGGSTNDNTYFGYSTPWGYFDFNRFHCHFSPRDWQRLINNNWGFRPKRLNFKLFNIQVKEVTTNEGTKTIANNLTSTVQVFTDSEYQLPYVLGSAHQGCLPPFPADVFMVPQYGYLTLNNGSQALGRSSFYCLEYFPSQMLRTGNNFQFSYTFEDVPFHSSYAHSQSLDRLMNPLIDQYLYYLVRTQTTGTGGTQTLAFSQAGPSSMANQARNWVPGPCYRQQRVSTTTNQNNNSNFAWTGAAKFKLNGRDSLMNPGVAMASHKDDEDRFFPSSGVLIFGKQGAGNDGVDYSQVLITDEEEIKATNPVATEEYGAVAINNQAANTQAQTGLVHNQGVIPGMVWQNRDVYLQGPIWAKIPHTDGNFHPSPLMGGFGLKHPPPQILIKNTPVPADPPLTFNQAKLNSFITQYSTGQVSVEIEWELQKENSKRWNPEIQYTSNYYKSTNVDFAVNTEGVYSEPRPIGTRYLTRNL

SEQ ID NO: 5057 - DNA, 2211 bp, Adeno-associated virus 1; identical to SEQ ID NO: 4940
  source 1..2211: mol_type = genomic DNA

SEQ ID NO: 5058 - protein, 736 aa, Adeno-associated virus 1; identical to SEQ ID NO: 5051

SEQ ID NO: 5059 - DNA, 4718 bp, Adeno-associated virus 1
  source 1..4718: mol_type = genomic DNA
ttgcccactccctctctgcgcgctcgctcgctcggtggggcctgcggaccaaaggtccgcagacggcagagctctgctctgccggccccaccgagcgagcgagcgcgcagagagggagtgggcaactccatcactaggggtaatcgcgaagcgcctcccacgctgccgcgtcagcgctgacgtaaattacgtcataggggagtggtcctgtattagctgtcacgtgagtgcttttgcgacattttgcgacaccacgtggccatttagggtatatatggccgagtgagcgagcaggatctccattttgaccgcgaaatttgaacgagcagcagccatgccgggcttctacgagatcgtgatcaaggtgccgagcgacctggacgagcacctgccgggcatttctgactcgtttgtgagctgggtggccgagaaggaatgggagctgcccccggattctgacatggatctgaatctgattgagcaggcacccctgaccgtggccgagaagctgcagcgcgacttcctggtccaatggcgccgcgtgagtaaggccccggaggccctcttctttgttcagttcgagaagggcgagtcctacttccacctccatattctggtggagaccacgggggtcaaatccatggtgctgggccgcttcctgagtcagattagggacaagctggtgcagaccatctaccgcgggatcgagccgaccctgcccaactggttcgcggtgaccaagacgcgtaatggcgccggaggggggaacaaggtggtggacgagtgctacatccccaactacctcctgcccaagactcagcccgagctgcagtgggcgtggactaacatggaggagtatataagcgcctgtttgaacctggccgagcgcaaacggctcgtggcgcagcacctgacccacgtcagccagacccaggagcagaacaaggagaatctgaaccccaattctgacgcgcctgtcatccggtcaaaaacctccgcgcgctacatggagctggtcgggtggctggtggaccggggcatcacctccgagaagcagtggatccaggaggaccaggcctcgtacatctccttcaacgccgcttccaactcgcggtcccagatcaaggccgctctggacaatgccggcaagatcatggcgctgaccaaatccgcgcccgactacctggtaggccccgctccgcccgcggacattaaaaccaaccgcatctaccgcatcctggagctgaacggctacgaacctgcctacgccggctccgtctttctcggctgggcccagaaaaggttcgggaagcgcaacaccatctggctgtttgggccggccaccacgggcaagaccaacatcgcggaagccatcgcccacgccgtgcccttctacggctgcgtcaactggaccaatgagaactttcccttcaatgattgcgtcgacaagatggtgatctggtgggaggagggcaagatgacggccaaggtcgtggagtccgccaaggccattctcggcggcagcaaggtgcgcgtggaccaaaagtgcaagtcgtccgcccagatcgaccccacccccgtgatcgtcacctccaacaccaacatgtgcgccgtgattgacgggaacagcaccaccttcgagcaccagcagccgttgcaggaccggatgttcaaatttgaactcacccgccgtctggagcatgactttggcaaggtgacaaagcaggaagtcaaagagttcttccgctgggcgcaggatcacgtgaccgaggtggcgcatgagttctacgtcagaaagggtggagccaacaaaagacccgcccccgatgacgcggataaaagcgagcccaagcgggcctgcccctcagtcgcggatccatcgacgtcagacgcggaaggagctccggtggactttgccgacaggtaccaaaacaaatgttctcgtcacgcgggcatgcttcagatgctgtttccctgcaagacatgcgagagaatgaatcagaatttcaacatttgcttcacgcacgggacgagagactgttcagagtgcttccccggcgtgtcagaatctcaaccggtcgtcagaaagaggacgtatcggaaactctgtgccattcatcatctgctggggcgggctcccgagattgcttgctcggcctgcgatctggtcaacgtggacctggatgactgtgtttctgagcaataaatgacttaaaccaggtatggctgccgatggttatcttccagattggctcgaggacaacctctctgagggcattcgcgagtggtgggacttgaaacctggagccccgaagcccaaagccaaccagcaaaagcaggacgacggccggggtctggtgcttcctggctacaagtacctcggacccttcaacggactcgacaagggggagcccgtcaacgcggcggacgcagcggccctcgagcacgacaaggcctacgaccagcagctcaaagcgggtgacaatccgtacctgcggtataaccacgccgacgccgagtttcaggagcgtctgcaagaagatacgtcttttgggggcaacctcgggcgagcagtcttccaggccaagaagcgggttctcgaacctctcggtctggttgaggaaggcgctaagacggctcctggaaagaaacgtccggtagagcagtcgccacaagagccagactcctcctcgggcatcggcaagacaggccagcagcccgctaaaaagagactcaattttggtcagactggcgactcagagtcagtccccgatccacaacctctcggagaacctccagcaacccccgctgctgtgggacctactacaatggcttcaggcggtggcgcaccaatggcagacaataacgaaggcgccgacggagtgggtaatgcctcaggaaattggcattgcgattccacatggctgggcgacagagtcatcaccaccagcacccgcacctgggccttgcccacctacaataaccacctctacaagcaaatctccagtgcttcaacgggggccagcaacgacaaccactacttcggctacagcaccccctgggggtattttgatttcaacagattccactgccacttttcaccacgtgactggcagcgactcatcaacaacaattggggattccggcccaagagactcaacttcaaactcttcaacatccaagtcaaggaggtcacgacgaatgatggcgtcacaaccatcgctaataaccttaccagcacggttcaagtcttctcggactcggagtaccagcttccgtacgtcctcggctctgcgcaccagggctgcctccctccgttcccggcggacgtgttcatgattccgcaatacggctacctgacgctcaacaatggcagccaagccgtgggacgttcatccttttactgcctggaatatttcccttctcagatgctgagaacgggcaacaactttaccttcagctacacctttgaggaagtgcctttccacagcagctacgcgcacagccagagcctggaccggctgatgaatcctctcatcgaccaatacctgtattacctgaacagaactcaaaatcagtccggaagtgcccaaaacaaggacttgctgtttagccgtgggtctccagctggcatgtctgttcagcccaaaaactggctacctggaccctgttatcggcagcagcgcgtttctaaaacaaaaacagacaacaacaacagcaattttacctggactggtgcttcaaaatataacctcaatgggcgtgaatccatcatcaaccctggcactgctatggcctcacacaaagacgacgaagacaagttctttcccatgagcggtgtcatgatttttggaaaagagagcgccggagcttcaaacactgcattggacaatgtcatgattacagacgaagaggaaattaaagccactaaccctgtggccaccgaaagatttgggaccgtggcagtcaatttccagagcagcagcacagaccctgcgaccggagatgtgcatgctatgggagcattacctggcatggtgtggcaagatagagacgtgtacctgcagggtcccatttgggccaaaattcctcacacagatggacactttcacccgtctcctcttatgggcggctttggactcaagaacccgcctcctcagatcctcatcaaaaacacgcctgttcctgcgaatcctccggcggagttttcagctacaaagtttgcttcattcatcacccaatactccacaggacaagtgagtgtggaaattgaatgggagctgcagaaagaaaacagcaagcgctggaatcccgaagtgcagtacacatccaattatgcaaaatctgccaacgttgattttactgtggacaacaatggactttatactgagcctcgccccattggcacccgttaccttacccgtcccctgtaattacgtgttaatcaataaaccggttgattcgtttcagttgaactttggtctcctgtccttcttatcttatcggttaccatggttatagcttacacattaactgcttggttgcgcttcgcgataaaagacttacgtcatcgggttacccctagtgatggagttgcccactccctctctgcgcgctcgctcgctcggtggggcctgcggaccaaaggtccgcagacggcagagctctgctctgccggccccaccgagcgagcgagcgcgcagagagggagtgggcaa

SEQ ID NO: 5060 - DNA, 255 bp, Adeno-associated virus 10
  source 1..255: mol_type = genomic DNA
ggtaattcctccggaaattggcattgcgattccacatggctgggcgacagagtcatcaccaccagcacccgaacctgggtcctgcccacctacaacaaccacatctacaagcaaatctccagcgagacaggagccaccaacgacaaccactacttcggctacagcaccccctgggggtattttgactttaacagattccactgccacttttcaccacgtgactggcagcgactcatcaacaacaactggggattc

SEQ ID NO: 5061 - protein, 738 aa, Adeno-associated virus 10
MAADGYLPDWLEDNLSEGIREWWDLKPGAPKPKANQQKQDDGRGLVLPGYKYLGPFNGLDKGEPVNAADAAALEHDKAYDQQLKAGDNPYLRYNHADAEFQERLQEDTSFGGNLGRAVFQAKKRVLEPLGLVEEAAKTAPGKKRPVEPSPQRSPDSSTGIGKKGQQPAKKRLNFGQTGESESVPDPQPIGEPPAGPSGLGSGTMAAGGGAPMADNNEGADGVGSSSGNWHCDSTWLGDRVITTSTRTWALPTYNNHLYKQISNGTSGGSTNDNTYFGYSTPWGYFDFNRFHCHFSPRDWQRLINNNWGFRPKRLSFKLFNIQVKEVTQNEGTKTIANNLTSTIQVFTDSEYQLPYVLGSAHQGCLPPFPADVFMIPQYGYLTLNNGSQAVGRSSFYCLEYFPSQMLRTGNNFEFSYTFEDVPFHSSYAHSQSLDRLMNPLIDQYLYYLSRTQSTGGTQGTQQLLFSQAGPANMSAQAKNWLPGPCYRQQRVSTTLSQNNNSNFAWTGATKYHLNGRDSLVNPGVAMATHKDDEERFFPSSGVLMFGKQGAGRDNVDYSSVMLTSEEEIKTTNPVATEQYGVVADNLQQANTGPIVGNVNSQGALPGMVWQNRDVYLQGPIWAKIPHTDGNFHPSPLMGGFGLKHPPPQILIKNTPVPADPPTTFSQAKLASFITQYSTGQVSVEIEWELQKENSKRWNPEIQYTSNYYKSTNVDFAVNTEGTYSEPRPIGTRYLTRNL

SEQ ID NO: 5062 - protein, 738 aa, Adeno-associated virus 10; identical to SEQ ID NO: 4756

SEQ ID NO: 5063 - DNA, 258 bp, Adeno-associated virus 11
  source 1..258: mol_type = genomic DNA
ggtaattcctccggaaattggcattgcgattccacatggctgggcgacagagtcatcaccaccagcacccgaacctgggccctgccaacctacaacaaccacctctacaaacaaatctccagcgcttcaacgggggccagcaacgacaaccactactttggctacagcaccccctgggggtattttgactttaacagattccactgccacttctcaccacgtgactggcagcgactcatcaacaacaactggggattc

SEQ ID NO: 5064 - DNA, 255 bp, Adeno-associated virus 12
  source 1..255: mol_type = genomic DNA
ggtaattcctccggaaattggcattgcgattccacatggctgggcgaccgagtcattaccaccagcacccggacttgggccctgcccacctacaacaaccacctctacaagcaaatctccagccaatcgggtgccaccaacgacaaccactacttcggctacagcaccccttgggggtattttgatttcaacagattccactgccatttctcaccacgtgactggcagcgactcatcaacaacaactggggattc

SEQ ID NO: 5065 - DNA, 2208 bp, Adeno-associated virus 2
  source 1..2208: mol_type = genomic DNA
atggctgccgatggttatcttccagattggctcgaggacactctctctgaaggaataagacagtggtggaagctcaaacctggcccaccaccaccaaagcccgcagagcggcataaggacgacagcaggggtcttgtgcttcctgggtacaagtacctcggacccttcaacggactcgacaagggagagccggtcaacgaggcagacgccgcggccctcgagcacgacaaagcctacgaccggcagctcgacagcggagacaacccgtacctcaagtacaaccacgccgacgcggagtttcaggagcgccttaaagaagatacgtcttttgggggcaacctcggacgagcagtcttccaggcgaaaaagagggttcttgaacctctgggcctggttgaggaacctgttaagacggctccgggaaaaaagaggccggtagagcactctcctgtggagccagactcctcctcgggaaccggaaaggcgggccagcagcctgcaagaaaaagattgaattttggtcagactggagacgcagactcagtacctgacccccagcctctcggacagccaccagcagccccctctggtctgggaactaatacgatggctacaggcagtggcgcaccaatggcagacaataacgagggcgccgacggagtgggtaattcctcgggaaattggcattgcgattccacatggatgggcgacagagtcatcaccaccagcacccgaacctgggccctgcccacctacaacaaccacctctacaaacaaatttccagccaatcaggagcctcgaacgacaatcactactttggctacagcaccccttgggggtattttgacttcaacagattccactgccacttttcaccacgtgactggcaaagactcatcaacaacaactggggattccgacccaagagactcaacttcaagctctttaacattcaagtcaaagaggtcacgcagaatgacggtacgacgacgattgccaataaccttaccagcacggttcaggtgtttactgactcggagtaccagctcccgtacgtcctcggctcggcgcatcaaggatgcctcccgccgttcccagcagacgtcttcatggtgccacagtatggatacctcaccctgaacaacgggagtcaggcagtaggacgctcttcattttactgcctggagtactttccttctcagatgctgcgtaccggaaacaactttaccttcagctacacttttgaggacgttcctttccacagcagctacgctcacagccagagtctggaccgtctcatgaatcctctcatcgaccagtacctgtattacttgagcagaacaaacactccaagtggaaccaccacgcagtcaaggcttcagttttctcaggccggagcgagtgacattcgggaccagtctaggaactggcttcctggaccctgttaccgccagcagcgagtatcaaagacatctgcggataacaacaacagtgaatactcgtggactggagctaccaagtaccacctcaatggcagagactctctggtgaatccgggcccggccatggcaagccacaaggacgatgaagaaaagttttttcctcagagcggggttctcatctttgggaagcaaggctcagagaaaacaaatgtggacattgaaaaggtcatgattacagacgaagaggaaatcaggacaaccaatcccgtggctacggagcagtatggttctgtatctaccaacctccagagaggcaacagacaagcagctaccgcagatgtcaacacacaaggcgttcttccaggcatggtctggcaggacagagatgtgtaccttcaggggcccatctgggcaaagattccacacacggacggacattttcacccctctcccctcatgggtggattcggacttaaacaccctcctccacagattctcatcaagaacaccccggtacctgcgaatccttcgaccaccttcagtgcggcaaagtttgcttccttcatcacacagtactccacgggacaggtcagcgtggagatcgagtgggagctgcagaaggaaaacagcaaacgctggaatcccgaaattcagtacacttccaactacaacaagtctgttaatgtggactttactgtggacactaatggcgtgtattcagagcctcgccccattggcaccagatacctgactcgtaatctgtaa

SEQ ID NO: 5066 - protein, 735 aa, Adeno-associated virus 2 [sequence omitted]

SEQ ID NO: 5067 - protein, 621 aa, Adeno-associated virus 2
MPGFYEIVIKVPSDLDGHLPGISDSFVNWVAEKEWELPPDSDMDLNLIEQAPLTVAEKLQRDFLTEWRRVSKAPEALFFVQFEKGESYFHMHVLVETTGVKSMVLGRFLSQIREKLIQRIYRGIEPTLPNWFAVTKTRNGAGGGNKVVDECYIPNYLLPKTQPELQWAWTNMEQYLSACLNLTERKRLVAQHLTHVSQTQEQNKENQNPNSDAPVIRSKTSARYMELVGWLVDKGITSEKQWIQEDQASYISFNAASNSRSQIKAALDNAGKIMSLTKTAPDYLVGQQPVEDISSNRIYKILELNGYDPQYAASVFLGWATKKFGKRNTIWLFGPATTGKTNIAEAIAHTVPFYGCVNWTNENFPFNDCVDKMVIWWEEGKMTAKVVESAKAILGGSKVRVDQKCKSSAQIDPTPVIVTSNTNMCAVIDGNSTTFEHQQPLQDRMFKFELTRRLDHDFGKVTKQEVKDFFRWAKDHVVEVEHEFYVKKGGAKKRPAPSDADISEPKRVRESVAQPSTSDAEASINYADRYQNKCSRHVGMNLMLFPCRQCERMNQNSNICFTHGQKDCLECFPVSESQPVSVVKKAYQKLCYIHHIMGKVPDACTACDLVNVDLDDCIFEQ

SEQ ID NO: 5068 - DNA, 4675 bp, Adeno-associated virus 2
  source 1..4675: mol_type = genomic DNA
ttggccactccctctctgcgcgctcgctcgctcactgaggccgggcgaccaaaggtcgcccgacgcccgggctttgcccgggcggcctcagtgagcgagcgagcgcgcagagagggagtggccaactccatcactaggggttcctggaggggtggagtcgtgacgtgaattacgtcatagggttagggaggtcctgtattagaggtcacgtgagtgttttgcgacattttgcgacaccatgtggtcacgctgggtatttaagcccgagtgagcacgcagggtctccattttgaagcgggaggtttgaacgcgcagccgccatgccggggttttacgagattgtgattaaggtccccagcgaccttgacgggcatctgcccggcatttctgacagctttgtgaactgggtggccgagaaggaatgggagttgccgccagattctgacatggatctgaatctgattgagcaggcacccctgaccgtggccgagaagctgcagcgcgactttctgacggaatggcgccgtgtgagtaaggccccggaggcccttttctttgtgcaatttgagaagggagagagctacttccacatgcacgtgctcgtggaaaccaccggggtgaaatccatggttttgggacgtttcctgagtcagattcgcgaaaaactgattcagagaatttaccgcgggatcgagccgactttgccaaactggttcgcggtcacaaagaccagaaatggcgccggaggcgggaacaaggtggtggatgagtgctacatccccaattacttgctccccaaaacccagcctgagctccagtgggcgtggactaatatggaacagtatttaagcgcctgtttgaatctcacggagcgtaaacggttggtggcgcagcatctgacgcacgtgtcgcagacgcaggagcagaacaaagagaatcagaatcccaattctgatgcgccggtgatcagatcaaaaacttcagccaggtacatggagctggtcgggtggctcgtggacaaggggattacctcggagaagcagtggatccaggaggaccaggcctcatacatctccttcaatgcggcctccaactcgcggtcccaaatcaaggctgccttggacaatgcgggaaagattatgagcctgactaaaaccgcccccgactacctggtgggccagcagcccgtggaggacatttccagcaatcggatttataaaattttggaactaaacgggtacgatccccaatatgcggcttccgtctttctgggatgggccacgaaaaagttcggcaagaggaacaccatctggctgtttgggcctgcaactaccgggaagaccaacatcgcggaggccatagcccacactgtgcccttctacgggtgcgtaaactggaccaatgagaactttcccttcaacgactgtgtcgacaagatggtgatctggtgggaggaggggaagatgaccgccaaggtcgtggagtcggccaaagccattctcggaggaagcaaggtgcgcgtggaccagaaatgcaagtcctcggcccagatagacccgactcccgtgatcgtcacctccaacaccaacatgtgcgccgtgattgacgggaactcaacgaccttcgaacaccagcagccgttgcaagaccggatgttcaaatttgaactcacccgccgtctggatcatgactttgggaaggtcaccaagcaggaagtcaaagactttttccggtgggcaaaggatcacgtggttgaggtggagcatgaattctacgtcaaaaagggtggagccaagaaaagacccgcccccagtgacgcagatataagtgagcccaaacgggtgcgcgagtcagttgcgcagccatcgacgtcagacgcggaagcttcgatcaactacgcagacaggtaccaaaacaaatgttctcgtcacgtgggcatgaatctgatgctgtttccctgcagacaatgcgagagaatgaatcagaattcaaatatctgcttcactcacggacagaaagactgtttagagtgctttcccgtgtcagaatctcaacccgtttctgtcgtcaaaaaggcgtatcagaaactgtgctacattcatcatatcatgggaaaggtgccagacgcttgcactgcctgcgatctggtcaatgtggatttggatgactgcatctttgaacaataaatgatttaaatcaggtatggctgccgatggttatcttccagattggctcgaggacactctctctgaaggaataagacagtggtggaagctcaaacctggcccaccaccaccaaagcccgcagagcggcataaggacgacagcaggggtcttgtgcttcctgggtacaagtacctcggacccttcaacggactcgacaagggagagccggtcaacgaggcagacgccgcggccctcgagcacgtacaaagcctacgaccggcagctcgacagcggagacaacccgtacctcaagtacaaccacgccgacgcggagtttcaggagcgccttaaagaagatacgtcttttgggggcaacctcggacgagcagtcttccaggcgaaaaagagggttcttgaacctctgggcctggttgaggaacctgttaagacggctccgggaaaaaagaggccggtagagcactctcctgtggagccagactcctcctcgggaaccggaaaggcgggccagcagcctgcaagaaaaagattgaattttggtcagactggagacgcagactcagtacctgacccccagcctctcggacagccaccagcagccccctctggtctgggaactaatacgatggctacaggcagtggcgcaccaatggcagacaataacgagggcgccgacggagtgggtaattcctccggaaattggcattgcgattccacatggatgggcgacagagtcatcaccaccagcacccgaacctgggccctgcccacctacaacaaccacctctacaaacaaatttccagccaatcaggagcctcgaacgacaatcactactttggctacagcaccccttgggggtattttgacttcaacagattccactgccacttttcaccacgtgactggcaaagactcatcaacaacaactggggattccgacccaagagactcaacttcaagctctttaacattcaagtcaaagaggtcacgcagaatgacggtacgacgacgattgccaataaccttaccagcacggttcaggtgtttactgactcggagtaccagctcccgtacgtcctcggctcggcgcatcaaggatgcctcccgccgttcccagcagacgtcttcatggtgccacagtatggatacctcaccctgaacaacgggagtcaggcagtaggacgctcttcattttactgcctggagtactttccttctcagatgctgcgtaccggaaacaactttaccttcagctacacttttgaggacgttcctttccacagcagctacgctcacagccagagtctggaccgtctcatgaatcctctcatcgaccagtacctgtattacttgagcagaacaaacactccaagtggaaccaccacgcagtcaaggcttcagttttctcaggccggagcgagtgacattcgggaccagtctaggaactggcttcctggaccctgttaccgccagcagcgagtatcaaagacatctgcggataacaacaacagtgaatactcgtggactggagctaccaagtaccacctcaatggcagagactctctggtgaatccggccatggcaagccacaaggacgatgaagaaaagttttttcctcagagcggggttctcatctttgggaagcaaggctcagagaaaacaaatgtgaacattgaaaaggtcatgattacagacgaagaggaaatcggaacaaccaatcccgtggctacggagcagtatggttctgtatctaccaacctccagagaggcaacagacaagcagctaccgcagatgtcaacacacaaggcgttcttccaggcatggtctggcaggacagagatgtgtaccttcaggggcccatctgggcaaagattccacacacggacggacattttcacccctctcccctcatgggtggattcggacttaaacaccctcctccacagattctcatcaagaacaccccggtacctgcgaatccttcgaccaccttcagtgcggcaaagtttgcttccttcatcacacagtactccacgggacacggtcagcgtggagatcgagtgggagctgcagaaggaaaacagcaaacgctggaatcccgaaattcagtacacttccaactacaacaagtctgttaatcgtggacttaccgtggatactaatggcgtgtattcagagcctcgccccattggcaccagatacctgactcgtaatctgtaattgcttgttaatcaataaaccgtttaattcgtttcagttgaactttggtctctgcgtatttctttcttatctagtttccatggctacgtagataagtagcatggcgggttaatcattaactacaaggaacccctagtgatggagttggccactccctctctgcgcgctcgctcgctcactgaggccgggcgaccaaaggtcgcccgacgcccgggctttgcccgggcggcctcagtgagcgagcgagcgcgcagagagggagtggccaa

SEQ ID NO: 5069 - DNA, 4679 bp, Adeno-associated virus 2
  source 1..4679: mol_type = genomic DNA
ttggccactccctctctgcgcgctcgctcgctcactgaggccgggcgaccaaaggtcgcccgacgcccgggctttgcccgggcggcctcagtgagcgagcgagcgcgcagagagggagtggccaactccatcactaggggttcctggaggggtggagtcgtgacgtgaattacgtcatagggttagggaggtcctgtattagaggtcacgtgagtgttttgcgacattttgcgacaccatgtggtcacgctgggtatttaagcccgagtgagcacgcagggtctccattttgaagcgggaggtttgaacgcgcagccgccatgccggggttttacgagattgtgattaaggtccccagcgaccttgacgggcatctgcccggcatttctgacagctttgtgaactgggtggccgagaaggaatgggagttgccgccagattctgacatggatctgaatctgattgagcaggcacccctgaccgtggccgagaagctgcagcgcgactttctgacggaatggcgccgtgtgagtaaggccccggaggcccttttctttgtgcaatttgagaagggagagagctacttccacatgcacgtgctcgtggaaaccaccggggtgaaatccatggttttgggacgtttcctgagtcagattcgcgaaaaactgattcagagaatttaccgcgggatcgagccgactttgccaaactggttcgcggtcacaaagaccagaaatggcgccggaggcgggaacaaggtggtggatgagtgctacatccccaattacttgctccccaaaacccagcctgagctccagtgggcgtggactaatatggaacagtatttaagcgcctgtttgaatctcacggagcgtaaacggttggtggcgcagcatctgacgcacgtgtcgcagacgcaggagcagaacaaagagaatcagaatcccaattctgatgcgccggtgatcagatcaaaaacttcagccaggtacatggagctggtcgggtggctcgtggacaaggggattacctcggagaagcagtggatccaggaggaccaggcctcatacatctccttcaatgcggcctccaactcgcggtcccaaatcaaggctgccttggacaatgcgggaaagattatgagcctgactaaaaccgcccccgactacctggtgggccagcagcccgtggaggacatttccagcaatcggatttataaaattttggaactaaacgggtacgatccccaatatgcggcttccgtctttctgggatgggccacgaaaaagttcggcaagaggaacaccatctggctgtttgggcctgcaactaccgggaagaccaacatcgcggaggccatagcccacactgtgcccttctacgggtgcgtaaactggaccaatgagaactttcccttcaacgactgtgtcgacaagatggtgatctggtgggaggaggggaagatgaccgccaaggtcgtggagtcggccaaagccattctcggaggaagcaaggtgcgcgtggaccagaaatgcaagtcctcggcccagatagacccgactcccgtgatcgtcacctccaacaccaacatgtgcgccgtgattgacgggaactcaacgaccttcgaacaccagcagccgttgcaagaccggatgttcaaatttgaactcacccgccgtctggatcatgactttgggaaggtcaccaagcaggaagtcaaagactttttccggtgggcaaaggatcacgtggttgaggtggagcatgaattctacgtcaaaaagggtggagccaagaaaagacccgcccccagtgacgcagatataagtgagcccaaacgggtgcgcgagtcagttgcgcagccatcgacgtcagacgcggaagcttcgatcaactacgcagacaggtaccaaaacaaatgttctcgtcacgtgggcatgaatctgatgctgtttccctgcagacaatgcgagagaatgaatcagaattcaaatatctgcttcactcacggacagaaagactgtttagagtgctttcccgtgtcagaatctcaacccgtttctgtcgtcaaaaaggcgtatcagaaactgtgctacattcatcatatcatgggaaaggtgccagacgcttgcactgcctgcgatctggtcaatgtggatttggatgactgcatctttgaacaataaatgatttaaatcaggtatggctgccgatggttatcttccagattggctcgaggacactctctctgaaggaataagacagtggtggaagctcaaacctggcccaccaccaccaaagcccgcagagcggcataaggacgacagcaggggtcttgtgcttcctgggtacaagtacctcggacccttcaacggactcgacaagggagagccggtcaacgaggcagacgccgcggccctcgagcacgacaaagcctacgaccggcagctcgacagcggagacaacccgtacctcaagtacaaccacgccgacgcggagtttcaggagcgccttaaagaagatacgtcttttgggggcaacctcggacgagcagtcttccaggcgaaaaagagggttcttgaacctctgggcctggttgaggaacctgttaagacggctccgggaaaaaagaggccggtagagcactctcctgtggagccagactcctcctcgggaaccggaaaggcgggccagcagcctgcaagaaaaagattgaattttggtcagactggagacgcagactcagtacctgacccccagcctctcggacagccaccagcagccccctctggtctgggaactaatacgatggctacaggcagtggcgcaccaatggcagacaataacgagggcgccgacggagtgggtaattcctccggaaattggcattgcgattccacatggatgggcgacagagtcatcaccaccagcacccgaacctgggccctgcccacctacaacaaccacctctacaaacaaatttccagccaatcaggagcctcgaacgacaatcactactttggctacagcaccccttgggggtattttgacttcaacagattccactgccacttttcaccacgtgactggcaaagactcatcaacaacaactggggattccgacccaagagactcaacttcaagctctttaacattcaagtcaaagaggtcacgcagaatgacggtacgacgacgattgccaataaccttaccagcacggttcaggtgtttactgactcggagtaccagctcccgtacgtcctcggctcggcgcatcaaggatgcctcccgccgttcccagcagacgtcttcatggtgccacagtatggatacctcaccctgaacaacgggagtcaggcagtaggacgctcttcattttactgcctggagtactttccttctcagatgctgcgtaccggaaacaactttaccttcagctacacttttgaggacgttcctttccacagcagctacgctcacagccagagtctggaccgtctcatgaatcctctcatcgaccagtacctgtattacttgagcagaacaaacactccaagtggaaccaccacgcagtcaaggcttcagttttctcaggccggagcgagtgacattcgggaccagtctaggaactggcttcctggaccctgttaccgccagcagcgagtatcaaagacatctgcggataacaacaacagtgaatactcgtggactggagctaccaagtaccacctcaatggcagagactctctggtgaatccgggcccggccatggcaagccacaaggacgatgaagaaaagttttttcctcagagcggggttctcatctttgggaagcaaggctcagagaaaacaaatgtggacattgaaaaggtcatgattacagacgaagaggaaatcaggacaaccaatcccgtggctacggagcagtatggttctgtatctaccaacctccagagaggcaacagacaagcagctaccgcagatgtcaacacacaaggcgttcttccaggcatggtctggcaggacagagatgtgtaccttcaggggcccatctgggcaaagattccacacacggacggacattttcacccctctcccctcatgggtggattcggacttaaacaccctcctccacagattctcatcaagaacaccccggtacctgcgaatccttcgaccaccttcagtgcggcaaagtttgcttccttcatcacacagtactccacgggacaggtcagcgtggagatcgagtgggagctgcagaaggaaaacagcaaacgctggaatcccgaaattcagtacacttccaactacaacaagtctgttaatgtggactttactgtggacactaatggcgtgtattcagagcctcgccccattggcaccagatacctgactcgtaatctgtaattgcttgttaatcaataaaccgtttaattcgtttcagttgaactttggtctctgcgtatttctttcttatctagtttccatggctacgtagataagtagcatggcgggttaatcattaactacaaggaacccctagtgatggagttggccactccctctctgcgcgctcgctcgctcactgaggccgggcgaccaaaggtcgcccgacgcccgggctttgcccgggcggcctcagtgagcgagcgagcgcgcagagagggagtggccaa

SEQ ID NO: 5070 - protein, 735 aa, Adeno-associated virus 2
MAADGYLPDWLEDTLSEGIRQWWKLKPGPPPPKPAERHKDDSRGLVLPGYKYLGPFNGLDKGEPVNEADAAALEHDKAYDRQLDSGDNPYLKYNHADAEFQERLKEDTSFGGNLGRAVFQAKKRVLEPLGLVEEPVKTAPGKKRPVEHSPVEPDSSSGTGKAGQQPARKRLNFGQTGDADSVPDPQPLGEPPATPAAVGPTTMASGGGAPMADNNEGADGVGNASGNWHCDSTWLGDRVITTSTRTWALPTYNNHLYKQISSASTGASNDNHYFGYSTPWGYFDFNRFHCHFSPRDWQRLINNNWGFRPKRLNFKLFNIQVKEVTQNDGTTTIANNLTSTVQVFTDSEYQLPYVLGSAHQGCLPPFPADVFMIPQYGYLTLNNGSQAVGRSSFYCLEYFPSQMLRTGNNFTFSYTFEDVPFHSSYAHSQSLDRLMNPLIDQYLYYLNRTQNQSGSAQDKALLFSRGSPAGMSVQPKNWLPGPCYRQQRVSKTKTDNNNSNFTWTGASKYNLNGRESIINPGTAMASHKDDKDKFFPMSGVMIFGKESAGASNTALDNVMITDEEEIKATNPVATERFGTVAVNFQSSSTDPATGDVHVMGALPGMVWQDRDVYLQGPIWAKIPHTDGHFHPSPLMGGFGLKHPPPQILIKNTPVPANPPAEFSATKFASFITQYSTGQVSVEIEWELQKENSKRWNPEVQYTSNYAKSANVDFTVDNNGLYTEPRPIGTRYLTRP

SEQ ID NO: 5071 - protein, 740 aa, Adeno-associated virus 2
MAADGYLPDWLEDTLSEGIRQWWKLKPGPPPPKPAERHKDDSRGLVLPGYKYLGPFNGLDKGEPVNAADAAALEHDKAYDRQLDSGDNPYLKYNHADAEFQERLKEDTSFGGNLGRAVFQAKKRVLEPLGLVEEPVKTAPGKKRPVEHSPVEPDSSSGTGKAGQQPARKRLNFGQTGDADSVPDPQPLGQPPAAPSGLGTNTMATGSGAPMADNNEGADGVGNSSGNWHCDSTWMGDRVITTSTRTWALPTYNNHLYKQISSQSGASNDNHYFGYSTPWGYFDFNRFHCHFSPRDWQRLINNNWGFRPKRLNFKLFNIQVKEVTQNDGTTTIANNLTSTVQVFTDSEYQLPYVLGSAHQGCLPPFPADVFMVPQYGYLTLNNGSQAVGRSSFYCLEYFPSQMLRTGNNFTFSYTFEDVPFHSSYAHSQSLDRLMNPLIDQYLYYLSRTNTPSGTTTQSGLQFSQAGASDIRDQSRNWLPGPCYRQQRVSKTSADNNNSEYSWTGATKYHLNGRDSLVNPGPAMASHKDDEEKFFPQSGVLIFGKQGSEKTNVDIEKVMITDEEEIRTTNPVATEQYGSVSTNLQRGNRQAATADVNTQGVLPGMVWQDRDVYLQGPIWAKIPHTDGHFHPSPLMGGFGLKHPPPQILIKNTPVPANPSTTFSAAKFASFITQYSTGQVSVEIEWELQKENSKRWNPEIQYTSNYNKSVNVDFTVDTNGVYSEPRPIGTRYLTRNLLLAAA

SEQ ID NO: 5072 - protein, 734 aa, Adeno-associated virus 2
MAADGYLPDWLEDTLSEGIRQWWKLKPGPPPPKPAERHKDDSRGLVLPGYKYLGPFNGLDKGEPVNEADAAALEHDKAYDRQLDSGDNPYLKYNHADAEFQERLKEDTSFGGNLGRAVFQAKKRVLEPLGLVEEPVKTAPGKKRPVEHSPVEPDSSSGTGKAGQQPARKRLNFGQTGDADSVPDPQPLGQPPAAPSGLGTNTMATGSGAPMADNNEGADGVGNSSGNWHCDSTWMGDRVITTSTRTWALPTYNNHLYKQISSQSGASNDNHYFGYSTPWGYFDFNRFHCHFSPRDWQRLINNNWGFRPKRLNFKLFNIQVKEVTQNDGTTTIANNLTSTVQVFTDSEYQLPYVLGSAHQGCLPPFPADVFMVPQYGYLTLNNGSQAVGRSSFYCLEYFPSQMLRTGNNFTFSYTFEDVPFHSSYAHSQSLDRLMNPLIDQYLYYLSRTNTPSGTTTQSGLQFSQAGASDIRDQSRNWLPGPCYRQQRVSKTSADNNNSEYSWTGATMYHLNGRDSLVNPGPAMASHKDDEEKFFPQSGVLIFGKQGSEKTNVDIEKVMITDEEEIRTTNPVATEQYGSVSTNLQRGNRQAATADVNTQGVLPGMVWQDRDVYLQGPIWAKIPHTDGHFHPSPLMGGFGLKHPPPQILIKNTPVPANPSTTFSAAKFASFITQYSTGQVSVEIEWELQKENSKRWNPEIQYTSNYNKSINVDFTVDTNGVYSEPRPIGTRYLTRN

SEQ ID NO: 5073 - protein, 734 aa, Adeno-associated virus 2
MAADGYLPDWLEDTLSEGIRQWWKLKPGPPPPKPAERHKDDSRGLVLPGYKYLGPFNGLDKGEPVNEADAAALEHDKAYDRQLDSGDNPYLKYNHADAEFQERLKEDTSFGGNLGRAVFQAKKRVLEPLGLVEEPVKTAPGKKRPVEHSPVEPDSSSGTGKAGQQPARKRLNFGQTGDADSVPDPQPLGQPPAAPSGLGTNTMATGSGAPMADNNEGADGVGNSSGNWHCDSTWMGDRVITTSTRTWALPTYNNHLYKQISSQSGASNDNHYFGYSTPWGYFDFNRFHCHFSPRDWQRLINNNWGFRPKRLNFKLFNIQVKEVTQNDGTTTIANNLTSTVQVFTDSEYQLPYVLGSAHQGCLPPFPADVFMVPQYGYLTLNNGSQAVGRSSFYCLEYFPSQMLRTGNNFTFSYTFEDVPFHSSYAHSQSLDRLMNPLIDQYLYYLSRTNTPSGTTTQSGLQFSQAGASDIRDQSRNWLPGPCYRQQRVSKTSADNNNSEYSWTGATKYHLNGRDSLVNPGPAMASHKDDEEKFFPQSGVLIFGKQGSEKTNVDIEKVMITDEEEIRTTNPVATEQYGSVSTNLQRGNRQAATADVNTQGVLPGMVWQDRDVYLQGPIWAKIPHTDGHFHPSPLMGGFGLKHPPPQILIKNTPVPANPSTTFSEAKFASFITQYSTGQVSVEIEWELQKENSKRWNPEIQYTSNYNKSVNVDFTVDTNGVYSEPRPIGTRYLTRN

SEQ ID NO: 5074 - protein, 739 aa, Adeno-associated virus 2
MAADGYLPDWLEDTLSEGIRQWWKLKPGPPPPKPAERHKDDSRGLVLPGYKYLGPFNGLDKGEPVNEADAAALEHDKAYDRQLDSGDNPYLKYNHADAEFQERLKEDTSFGGNLGRAVFQAKKRVLEPLGLVEEPVKTAPGKKRPVEHSPVEPDSSSGTGKAGQQPARKRLNFGQTGDADSVPDPQPLGQPPAAPSGLGTNTMATGSGAPMADNNEGADGVGNSSGNWHCDSTWMGDRVITTSTRTWALPTYNNHLYKQISSQSGASNDNHYFGYSTPWGYFDFNRFHCHFSPRDWQRLINNNWGFRPKRLNFKLFNIQVKEVTQNDGTTTIANNLTSTVQVFTDSEYQLPYVLGSAHQGCLPPFPADVFMVPQYGYLTLNNGSQAVGRSSFYCLEYFPSQMLRTGNNFTFSYTFEDVPFHSSYAHSQSLDRLMNPLIDQYLYYLSRTNTPSGTTTQSGLQFSQAGASDIRDQSRNWLPGPCYRQQRVSKTSADNNNSEYSWTGATKYHLNGRDSLVNPGPAMASHKDDEEKFFPQSGVLIFGKQGSEKTNVDIEKVMITDEEEIRTTNPVATEQYGSVSTNLQRGNRQAATADVNTQGVLPGMVWQDRDVYLQGPIWAKIPHTDGHFHPSPLMGGFGLKHPPPQILIKNTPVPANPSTTFSAAKFASFITQYSTGQVSVEIEWELQKENSKRWNPEIQYTSNYNKSVNVDFTVDTNGVYSEPRPIGTRYLTRNLLLAA

SEQ ID NO: 5075 - protein, 725 aa, Adeno-associated virus 2
MAADGYLPDWLEDTLSEGIRQWWKLKPGPPPPKPAERHKDDSRGLVLPGYKYLGPFNGLDKGEPVNEADAAALEHDKAYDRQLDSGDNPYLKYNHADAEFQERLKEDTSFGGNLGRAVFQAKKRVLEPLGLVEEPVKTAPGKKRPVEHSPVEPDSSSGTGKAGQQPARKRLNFGQTGDADSVPDPQPLGQPPAAPSGLGTNTMATGSGAPMADNNEGADGVGNSSGNWHCDSTWMGDRVITTSTRTWALPTYNNHLYKQISSQSGASNDNHYFGYSTPWGYFDFNRFHCHFSPRDWQRLINNNWGFRPKRLNFKLFNIQVKEVTQNDGTTTIANNLTSTVQVFTDSEYQLPYVLGSAHQGCLPPFPADVFMVPQYGYLTLNNGSQAVGRSSFYCLEYFPSQMLRTGNNFTFSYTFEDVPFHSSYAHSQSLDRLMNPLIDQYLYYLSRTNTPSGTTTQSGLQFSQAGASDIRDQSRNWLPGPCYRQQRVSKTSADNNNSEYSWTGATKYHLNGRDSLVNPGPAMASHKDDEEKFFPQSGVLIFGKQGSEKTNVDIEKVMITDEEEIRTTNPVATEQYGSVSTNLQRGNRQAATADVNTQGVLPGMVWQDRDVYLQGPIWAKIPHTDGHFHPSPLMGGFGLKHPPPQILIKNTPVPANPSTTFSAAKFASFITQYSTGQVSVEIEWELQKENSKRWNPEIQYTSNYNKSVNVDFTVDTNGVYSEPRP

SEQ ID NO: 5076 - protein, 707 aa, Adeno-associated virus 2
MAADGYLPDWLEDTLSEGIRQWWKLKPGPPPPKPAERHKDDSRGLVLPGYKYLGPFNGLDKGEPVNEADAAALEHDKAYDRQLDSGDNPYLKYNHADAEFQERLKEDTSFGGNLGRAVFQAKKRVLEPLGLVEEPVKTAPGKKRPVEHSPVEPDSSSGTGKAGQQPARKRLNFGQTGDADSVPDPQPLGQPPAAPSGLGTNTMATGSGAPMADNNEGADGVGNSSGNWHCDSTWMGDRVITTSTRTWALPTYNNHLYKQISSQSGASNDNHYFGYSTPWGYFDFNRFHCHFSPRDWQRLINNNWGFRPKRLNFKLFNIQVKEVTQNDGTTTIANNLTSTVQVFTDSEYQLPYVLGSAHQGCLPPFPADVFMVPQYGYLTLNNGSQAVGRSSFYCLEYFPSQMLRTGNNFTFSYTFEDVPFHSSYAHSQSLDRLMNPLIDQYLYYLSRTNTPSGTTTQSGLQFSQAGASDIRDQSRNWLPGPCYRQQRVSKTSADNNNSEYSWTGATKYHLNGRDSLVNPGPAMASHKDDEEKFFPQSGVLIFGKQGSEKTNVDIEKVMITDEEEIRTTNPVATEQYGSCIYQPPERQQTSSYRRCQHTRRSSRHGLAGQRCVPSGAHLGKDSTHGRTFSPLSPHGWIRTTPSSTDSHQEHPGTCESFDHLQCGKVCFLHHTVLHGTGQRGDRVRAAEGKQQTLESRNSVHFQLQQVC

SEQ ID NO: 5077 - protein, 739 aa, Adeno-associated virus 2; identical to SEQ ID NO: 5074

SEQ ID NO: 5078 - protein, 737 aa, Adeno-associated virus 2
MASDGYLPDWLEDNLSEGIREWWDLKPGAPKPKANQQKQDDGRGLVLPGYKYLGPFNGLDKGEPVNAADAAALEHDKAYDQQLKAGDNPYLRYNHADAEFQERLQEDTSFGGNLGRAVFQAKKRVLEPFGLVEEGAKTAPGKKRPVEQSPQEPDSSSGIGKTGQQPAKKRLNFGQTGDSESVPDPQPLGEPPATPAAVGPTTMASGGGAPMADNNEGADGVGNASGNWHCDSTWLGDRVITTSTRTWALPTYNNHLYKQISSASTGASNDNHYFGYSTPWGYFDFNRFHCHFSPRDWQRLINNNWGFRPKRLNFKLFNIQVKEVTTNDGTTTIANNLTSTVQVFTDSEYQLPYVLGSAHQGCLPPFPADVFMVPQYGYLTLNNGSQAVGRSSFYCLEYFPSQMLRTGNNFTFSYTFEDVPFHSSYAHSQSLDRLMNPLIDQYLYYLSRTNTPSGTTTQSGLQFSQAGASDIRDQSRNWLPGPCYRQQRVSKTSADNNNSEYSWTGATKYHLNGRDSLVNPGPAMASHKDDEEKFFPQSGVLIFGKQGSEKTNVDIEKVMITDEEEIRTTNPVATEQYGSVSTNLQRGNRQAATADVNTQGVLPGMVWQDRDVYLQGPIWAKIPHTDGHFHPSPLMGGFGLKHHPPQILIKNTPVPANPSTTFSAAKFASFITQYSTGQVSVEIEWELQKENSKRWNPEIQYTSNYNKSVNVDFTVDTNGVYSEPRPIGTRYLTRNLL

SEQ ID NO: 5079 - protein, 741 aa, Adeno-associated virus 2
MAADGYLPDWLEDTLSEGIREWWALKPGAPKPKANQQKQDDGRGLVLPGYKYLGPFNGLDKGEPVNEADAAALEHDKAYDQQLQAGDNPYLRYNHADAEFQERLQEDTSFGGNLGRAVFQAKKRVLEPLGLVEEPVKTAPGKKRPVEHSPVEPDSSSGTGKSGQQPARKRLNFGQTGDADSVPDPQPLGQPPAAPSGLGTNTMATGSGAPMADNNEGADGVGNSSGNWHCDSTWMGDRVITTSTRTWALPTYNNHLYKQISSQSGASNDNHYFGYSTPWGYFDFNRFHCHFSPRDWQRLINNNWGFRPKRLNFKLFNIQVKEVTQNDGTTTIANNLTSTVQVFTDSEYQLPYVLGSAHQGCLPPFPADVFMVPQYGYLTLNNGSQAVGRSSFYCLEYFPSQMLRTGNNFTFSYTFEDVPFHSSYAHSQSLDRLMNPLIDQYLYYLSRTNTPSGTTTQSGLQFSQAGASDIRDQSRNWLPGPCYRQQRVSKTSADNNNSEYSWTGATKYHLNGRDSLVNPGPAMASHKDDEEKFFPQSGVLIFGKQGSEKTNVDIEKVMITDEEEIRTTNPVATEQYGSVSTNLQRGNLANHNNTTNARQAATADVNTQGVLPGMVWQDRDVYLQGPIWAKIPHTDGHFHPSPLMGGFGLKHPPPQILIKNTPVPANPSTTFSAAKFASFITQYSTGQVSVEIEWELQKENSKRWNPEIQYTSNYNKSINVDFTVDTNGVYSEPRPIGTRYL

SEQ ID NO: 5080 - protein, 730 aa, Adeno-associated virus 2
MASDGYLPDWLEDNLSEGIREWWDLKPGAPKPKANQQKQDDGRGLVLPGYKYLGPFNGLDKGEPVNAADAAALEHDKAYDQQLKAGDNPYLRYNHADAEFQERLQEDTSFGGNLGRAVFQAKKRVLEPFGLVEEGAKTAPGKKRPVEQSPQEPDSSSGIGKTGQQPAKKRLNFGQTGDSESVPDPQPLGEPPATPAAVGPTTMASGGGAPMADNNEGADGVGNASGNWHCDSTWLGDRVITTSTRTWALPTYNNHLYKQISSASTGASNDNHYFGYSTPWGYFDFNRFHCHFSPRDWQRLINNNWGFRPKRLNFKLFNIQVKEVTTNDGVTTIANNLTSTVQVFSDSEYQLPYVLGSAHQGCLPPFPADVFMIPQYGYLTLNNGSQAVGRSSFYCLEYFPSQMLRTGNNFTFSYTFEDVPFHSSYAHSQSLDRLMNPLIDQYLYYLNRTQNQSGSAQNNDLLFSRGSPAGMSVQPKNWLPGPCYRQQRVSKTKTDNNNSNFTWTGASKYNLNGRESIINPGTAMASHKDDKDKFFPMSGVMIFGKESAGASNTALDNVMITDEEEIKATNPVATERFGTVAVNLQSSSTDPATGDVHVMGALPGMVWQDRDVYLQGPIWAKIPHTDGHFHPSPLMGGFGLKNPPPQILIKNTPVPANPPAEFSATKFASFITQYSTGQVSVEIEWELQKENSKRWNPEVQYTSNYAKSANVDFTVDNNGLYTEPRPIGTR

SEQ ID NO: 5081 - protein, 735 aa, Adeno-associated virus 2
MASDGYLPDWLEDNLSEGIREWWDLKPGAPKPKANQQKQDDGRGLVLPGYKYLGPFNGLDKGEPVNAADAAALEHDKAYDQQLKAGDNPYLRYNHADAEFQERLQEDTSFGGNLGRAVFQAKKRVLEPFGLVEEGAKTAPGKKRPVEQSPQEPDSSSGIGKTGQQPAKKRLNFGQTGDSESVPDPQPLGEPPATPAAVGPTTMASGGGAPMADNNEGADGVGNASGNWHCDSTWLGDRXITTSTRTWALPTYNNHLYKQISSASTGASNDNHYFGYSTPWGYFDFNRFHCHFSPRDWQRLINNNWGFRPKRLNFKLFNIQVKEVTTNDGVTTIANNLTSTVQVFSDSEYQLPYVLGSAHQGCLPPFPADVFMIPQYGYLTLNNGSQAVGRSSFYCLEYFPSQMLRTGNNFTFSYTFEDVPFHSSYAHSQSLDRLMNPLIDQYLYYLNRTQNQSGSAQNNDLLFSRGSPAGMSVQPKNWLPGPCYRQQRVSKTKTDNNNSNFTWTGASKYNLNGRESIINPGTAMASHKDDKDKFFPMSGVMIFGKESAGASNTALDNVMITDEEEIKATNPVATERFGTVAVNLQSSSTDPATGDVHVMGALPGMVWQDRDVYLQGPIWAKIPHTDGHFHPSPLMGGFGLKNPPPQILIKNTPVPANPPAEFSATKFASFITQYSTGQVSVEIEWELQKENSKRWNPEVQYTSNYAKSANVDFTVDNNGLYTEPRPIGTRYLTRP

SEQ ID NO: 5082 - protein, 733 aa, Adeno-associated virus 2
MASDGYLPDWLEDNLSEGIREWWDLKPGAPKPKANQQKQDDGRGLVLPGYKYLGPFNGLDKGEPVNAADAAALEHDKAYDQQLKAGDNPYLRYNHADAEFQERLQEDTSFGGNLGRAVFLAKKRVLEPFGLVEEGAKTAPGKKRPVEQSPQEPDSSSGIGKTGQQPAKKRLNFGQTGDSESVPDPQPLGEPPATPAAVGPTTMASGGGAPMADNNEGADGVGNASGNWHCDSTWLGDRVITTSTRTWALPTYNNHLYKQISSASTGASNDNHYFGYSTPWGYFDFNRFHCHFSPRDWQRLINNNWGFRPKRLNFKLFNIQVKEVTTNDGVTTIANNLTSTVQVFSDSEYQLPYVLGSAHQGCLPPFPADVFMIPQYGYLTLNNGSQAVGRSSFYCLEYFPSQMLRTGNNFTFSYTFEDVPFHSSYAHSQSLDRLMNPLIDQYLYYLNRTQNQSGSAQNNDLLFSRGSPAGMSVQPKNWLPGPCYRQQRVSKTKTDNNNSNFTWTGASKYNLNGRESIINPGTAMASHKDDKDKFFPMSGVMIFGKESAGASNTALDNVMITDEEEIKATNPVATERFGTVAVNLQSSSTDPATGDVHVMGALPGMVWQDRDVYLQGPIWAKIPHTDGHFHPSPLMGGFGLKNPPPQILIKNTPVPANPPAEFSATKFASFITQYSTGQVSVEIEWELQKENSKRWNPEVQYTSNYAKSANVDFTVDNNGLYTEPRPIGTRYLT

SEQ ID NO: 5083 - protein, 734 aa, Adeno-associated virus 2
MAADGYLPDWLEDTLSEGIRQWWKLKPGPPPPKPAERHKDDSRGLVLPGCKYLGPFNGLDKGEPVNEADAAALEHDKAYDRQLDSGDNPYLKYNHADAEFQERLKEDTSFGGNLGRAVFQAKKRVLEPLGLVEEPVKTAPGKKRPVEHSPVEPDSSSGTGKAGQQPARKRLNFGQTGDADSVPDPQPLGQPPAAPSGLGTNTMATGSGAPMADNNEGADGVGNSSGNWHCDSTWMGDRVITTSTRTWALPTYNNHLYKQISSQSGASNDNHYFGYSTPWGYFDFNRFHCHFSPRDWQRLINNNWGFRPKRLNFKLFNIQVKEVTQNDGTTTIANNLTSTVQVFSDSEYQLPYVLGSAHQGCLPPFPADVFMIPQYGYLTLNNGSQAVGRSSFYCLEYFPSQMLRTGNNFTFNYTFEDVPFHSSYAHSQSLDRLMNPLIDQYLYYLNRTQNQSGSAQNNDLLFSRGSPAGMSVQPKNWLPGPCYRQQRVSKTKTDNNNSNFTWTGASKYNLNGRESIINPGTAMASHKDDKDKFFPMSGVMIFGKESAGASNTALDNVMITDEEEIKATNPVATERFGTVAVNLQSSSTDPATGDVHVMGALPGMVWQDRDVYLQGPIWAKIPHTDGHFHPSPLMGGFGLKNPPPQILIKNTPVPANPPAEFSATKFASFITQYSTGQVSVEIEWELQKENSKRWNPEVQYTSNYAKSANVDFTVDNNGLYTEPRPIGTRYLTRP

SEQ ID NO: 5084 - protein, 734 aa, Adeno-associated virus 2
MAADGYLPDWLEDTLSEGIRQWWKLKPGPPPPKPAERHKDDSRGLVLPGYKYLGPFNGLDKGEPVNEADAAALEHDKAYDRQLDSGDNPYLKYNHADAEFQERLKEDTSFGGNLGRAVFQAKKRVLEPLGLVEEPVKTAPGKKRPVEHSPVEPDSSSGTGKAGQQPARKRLNFGQTGDADSVPDPQPLGQPPAAPSGLGTNTMATGSGAPMADNNEGADGVGNSSGNWHCDSTWMGDRVITTSTRTWALSTYNNHLYKQISSQSGASNDNHYFGYSTPWGYFDFNRFHCHFSPRDWQRLINNNWGFRPKRLNFKLFNIQVKEVTQNDGTTTIANNLTSTVQVFTDSEYQLPYVLGSAHQGCLPPFPADVFMVPQYGYLTLNNGSQAVGRSSFYCLEYFPSQMLRTGNNFTFSYTFEDVPFHSSYAHSQSLDRLMNPLIDQYLYYLSRTNTPSGTTTQSRLQFSQAGASDIRDQSRNWLPGPCYRQQRVSKTSADNNNSEYSWTGATKYHLNGRDSLVNPGPAMASHKDDEEKFFPQSGVLIFGKQGSEKTNVDIEKVMITDEEEIRTTNPVATEQYGSVSTNLQRGNRQAATADVNTQGVLPGMVWQDRDVYLQGPIWAKIPHTDGHFHPSPLMGGFGLKHPPPQILIKNTPVPANPSTTFSAAKFASFITQYSTGQVSVEIEWELQKENSKRWNPEIQYTSNYNKSINVDFTVDTNGVYSEPRPIGTRYLTRN

SEQ ID NO: 5085 - protein, 738 aa, Adeno-associated virus 2
MAADGYLPDWLEDTLSEGIRQWWKLKPGPPPPKPAERHKDDSRGLVLPGYKYLGPFNGLDKGEPVNEADAAALEHDKAYDRQLDGGDNPYLKYNHADAEFQERLKEDTSFGGNLGRAVFQAKKRVLEPLGLVEEPVKTAPGKKRPVEHSPVEPDSSSGTGKAGQQPARKRLNFGQTGDADSVPDPQPLGQPPAAPSGLGTNTMATGSGAPMADNNEGADGVGNSSGNWHCDSTWMGDRVITTSTRTWALPTYNNHLYKQISSQSGASNDNHYFGYSTPWGYFDFNRFHCHFSPRDWQRLINNNWGFRPKRLNFKLFNIQVKEVTQNDGTTTIANNLTSTVQVFTDSEYQLPYVLGSAHQGCLPPFPADVFMVPQYGYLTLNNGSQAVGRSSFYCLEYFPSQMLRTGNNFTFSYTFEDVPFHSSYAHSQSLDRLMNPLIDQYLYYLSRTNTPSGTTTQSGLQFSQAGASDIRDQSRNWLPGPCYRQQRVSKTSADNNNSEYSWTGATKYHLNGRDSLVNPGPAMASHKDDEEKFFPQSGVLIFGKQGSEKTNVDIEKVMITDEEEIRTTNPVATEQYGSVSTNLQRGNRQAATADVNTQGVLPGMVWQDRDVYLQGPIWAKIPHTDGHFHPSPLMGGFGLKHPPPQILIKNTPVPANPSTTFSAAKFASFITQYSTGQVSVEIEWELQKENSKRWNPEIQYTSNYNKSVNVDFTVDTNGVYSEPRPIGTRYLTRNLLRP

SEQ ID NO: 5086 - protein, 736 aa, Adeno-associated virus 3; identical to SEQ ID NO: 4720

SEQ ID NO: 5087 - DNA, 4726 bp, Adeno-associated virus 3
  source 1..4726: mol_type = genomic DNA
ttggccactccctctatgcgcactcgctcgctcggtggggcctggcgaccaaaggtcgccagacggacgtgctttgcacgtccggccccaccgagcgagcgagtgcgcatagagggagtggccaactccatcactagaggtatggcagtgacgtaacgcgaagcgcgcgaagcgagaccacgcctaccagctgcgtcagcagtcaggtgacccttttgcgacagtttgcgacaccacgtggccgctgagggtatatattctcgagtgagcgaaccaggagctccattttgaccgcgaaatttgaacgagcagcagccatgccggggttctacgagattgtcctgaaggtcccgagtgacctggacgagcgcctgccgggcatttctaactcgtttgttaactgggtggccgagaaggaatgggacgtgccgccggattctgacatggatccgaatctgattgagcaggcacccctgaccgtggccgaaaagcttcagcgcgagttcctggtggagtggcgccgcgtgagtaaggccccggaggccctcttttttgtccagttcgaaaagggggagacctacttccacctgcacgtgctgattgagaccatcggggtcaaatccatggtggtcggccgctacgtgagccagattaaagagaagctggtgacccgcatctaccgcggggtcgagccgcagcttccgaactggttcgcggtgaccaaaacgcgaaatggcgccgggggcgggaacaaggtggtggacgactgctacatccccaactacctgctccccaagacccagcccgagctccagtgggcgtggactaacatggaccagtatttaagcgcctgtttgaatctcgcggagcgtaaacggctggtggcgcagcatctgacgcacgtgtcgcagacgcaggagcagaacaaagagaatcagaaccccaattctgacgcgccggtcatcaggtcaaaaacctcagccaggtacatggagctggtcgggtggctggtggaccgcgggatcacgtcagaaaagcaatggattcaggaggaccaggcctcgtacatctccttcaacgccgcctccaactcgcggtcccagatcaaggccgcgctggacaatgcctccaagatcatgagcctgacaaagacggctccggactacctggtgggcagcaacccgccggaggacattaccaaaaatcggatctaccaaatcctggagctgaacgggtacgatccgcagtacgcggcctccgtcttcctgggctgggcgcaaaagaagttcgggaagaggaacaccatctggctctttgggccggccacgacgggtaaaaccaacatcgcggaagccatcgcccacgccgtgcccttctacggctgcgtaaactggaccaatgagaactttcccttcaacgattgcgtcgacaagatggtgatctggtgggaggagggcaagatgacggccaaggtcgtggagagcgccaaggccattctgggcggaagcaaggtgcgcgtggaccaaaagtgcaagtcatcggcccagatcgaacccactcccgtgatcgtcacctccaacaccaacatgtgcgccgtgattgacgggaacagcaccaccttcgagcatcagcagccgctgcaggaccggatgtttgaatttgaacttacccgccgtttggaccatgactttgggaaggtcaccaaacaggaagtaaaggactttttccggtgggcttccgatcacgtgactgacgtggctcatgagttctacgtcagaaagggtggagctaagaaacgccccgcctccaatgacgcggatgtaagcgagccaaaacgggagtgcacgtcacttgcgcagccgacaacgtcagacgcggaagcaccggcggactacgcggacaggtaccaaaacaaatgttctcgtcacgtgggcatgaatctgatgctttttccctgtaaaacatgcgagagaatgaatcaaatttccaatgtctgttttacgcatggtcaaagagactgtggggaatgcttccctggaatgtcagaatctcaacccgtttctgtcgtcaaaaagaagacttatcagaaactgtgtccaattcatcatatcctgggaagggcacccgagattgcctgttcggcctgcgatttggccaatgtggacttggatgactgtgtttctgagcaataaatgacttaaaccaggtatggctgctgacggttatcttccagattggctcgaggacaacctttctgaaggcattcgtgagtggtgggctctgaaacctggagtccctcaacccaaagcgaaccaacaacaccaggacaaccgtcggggtcttgtgcttccgggttacaaatacctcggacccggtaacggactcgacaaaggagagccggtcaacgaggcggacgcggcagccctcgaacacgacaaagcttacgaccagcagctcaaggccggtgacaacccgtacctcaagtacaaccacgccgacgccgagtttcaggagcgtcttcaagaagatacgtcttttgggggcaaccttggcagagcagtcttccaggccaaaaagaggatccttgagcctcttggtctggttgaggaagcagctaaaacggctcctggaaagaagggggctgtagatcagtctcctcaggaaccggactcatcatctggtgttggcaaatcgggcaaacagcctgccagaaaaagactaaatttcggtcagactggagactcagagtcagtcccagaccctcaacctctcggagaaccaccagcagcccccacaagtttgggatctaatacaatggcttcaggcggtggcgcaccaatggcagacaataacgagggtgccgatggagtgggtaattcctcaggaaattggcattgcgattcccaatggctgggcgacagagtcatcaccaccagcaccagaacctgggccctgcccacttacaacaaccatctctacaagcaaatctccagccaatcaggagcttcaaacgacaaccactactttggctacagcaccccttgggggtattttgactttaacagattccactgccacttctcaccacgtgactggcagcgactcattaacaacaactggggattccggcccaagaaactcagcttcaagctcttcaacatccaagttagaggggtcacgcagaacgatggcacgacgactattgccaataaccttaccagcacggttcaagtgtttacggactcggagtatcagctcccgtacgtgctcgggtcggcgcaccaaggctgtctcccgccgtttccagcggacgtcttcatggtccctcagtatggatacctcaccctgaacaacggaagtcaagcggtgggacgctcatccttttactgcctggagtacttcccttcgcagatgctaaggactggaaataacttccaattcagctataccttcgaggatgtaccttttcacagcagctacgctcacagccagagtttggatcgcttgatgaatcctcttattgatcagtatctgtactacctgaacagaacgcaaggaacaacctctggaacaaccaaccaatcacggctgctttttagccaggctgggcctcagtctatgtctttgcaggccagaaattggctacctgggccctgctaccggcaacagagactttcaaagactgctaacgacaacaacaacagtaactttccttggacagcggccagcaaatatcatctcaatggccgcgactcgctggtgaatccaggaccagctatggccagtcacaaggacgatgaagaaaaatttttccctatgcacggcaatctaatatttggcaaagaagggacaacggcaagtaacgcagaattagataatgtaatgattacggatgaagaagagattcgtaccaccaatcctgtggcaacagagcagtatggaactgtggcaaataacttgcagagctcaaatacagctcccacgactggaactgtcaatcatcagggggccttacctggcatggtgtggcaagatcgtgacgtgtaccttcaaggacctatctgggcaaagattcctcacacggatggacactttcatccttctcctctgatgggaggctttggactgaaacatccgcctcctcaaatcatgatcaaaaatactccggtaccggcaaatcctccgacgactttcagcccggccaagtttgcttcatttatcactcagtactccactggacaggtcagcgtggaaattgagtgggagctacagaaagaaaacagcaaacgttggaatccagagattcagtacacttccaactacaacaagtctgttaatgtggactttactgtagacactaatggtgtttatagtgaacctcgccctattggaacccggtatctcacacgaaacttgtgaatcctggttaatcaataaaccgtttaattcgtttcagttgaactttggctcttgtgcacttctttatctttatcttgtttccatggctactgcgtagataagcagcggcctgcggcgcttgcgcttcgcggtttacaactgctggttaatatttaactctcgccatacctctagtgatggagttggccactccctctatgcgcactcgctcgctcggtggggcctggcgaccaaaggtcgccagacggacgtgctttgcacgtccggccccaccgagcgagcgagtgcgcatagagggagtggccaa

SEQ ID NO: 5088 - protein, 736 aa, Adeno-associated virus 3A; identical to SEQ ID NO: 4720

SEQ ID NO: 5089 - protein, 624 aa, Adeno-associated virus 3A
MPGFYEIVLKVPSDLDERLPGISNSFVNWVAEKEWDVPPDSDMDPNLIEQAPLTVAEKLQREFLVEWRRVSKAPEALFFVQFEKGETYFHLHVLIETIGVKSMVVGRYVSQIKEKLVTRIYRGVEPQLPNWFAVTKTRNGAGGGNKVVDDCYIPNYLLPKTQPELQWAWTNMDQYLSACLNLAERKRLVAQHLTHVSQTQEQNKENQNPNSDAPVIRSKTSARYMELVGWLVDRGITSEKQWIQEDQASYISFNAASNSRSQIKAALDNASKIMSLTKTAPDYLVGSNPPEDITKNRIYQILELNGYDPQYAASVFLGWAQKKFGKRNTIWLFGPATTGKTNIAEAIAHAVPFYGCVNWTNENFPFNDCVDKMVIWWEEGKMTAKVVESAKAILGGSKVRVDQKCKSSAQIEPTPVIVTSNTNMCAVIDGNSTTFEHQQPLQDRMFEFELTRRLDHDFGKVTKQEVKDFFRWASDHVTDVAHEFYVRKGGAKKRPASNDADVSEPKRECTSLAQPTTSDAEAPADYADRYQNKCSRHVGMNLMLFPCKTCERMNQISNVCFTHGQRDCGECFPGMSESQPVSVVKKKTYQKLCPIHHILGRAPEIACSACDLANVDLDDCVSEQ

SEQ ID NO: 5090 - protein, 736 aa, Adeno-associated virus 3B
MAADGYLPDWLEDNLSEGIREWWALKPGVPQPKANQQHQDNRRGLVLPGYKYLGPGNGLDKGEPVNEADAAALEHDKAYDQQLKAGDNPYLKYNHADAEFQERLQEDTSFGGNLGRAVFQAKKRILEPLGLVEEAAKTAPGKKRPVDQSPQEPDSSSGVGKSGKQPARKRLNFGQTGDSESVPDPQPLGEPPAAPTSLGSNTMASGGGAPMADNNEGADGVGNSSGNWHCDSQWLGDRVITTSTRTWALPTYNNHLYKQISSQSGASNDNHYFGYSTPWGYFDFNRFHCHFSPRDWQRLINNNWGFRPKKLSFKLFNIQVKEVTQNDGTTTIANNLTSTVQVFTDSEYQLPYVLGSAHQGCLPPFPADVFMVPQYGYLTLNNGSQAVGRSSFYCLEYFPSQMLRTGNNFQFSYTFEDVPFHSSYAHSQSLDRLMNPLIDQYLYYLNRTQGTTSGTTNQSRLLFSQAGPQSMSLQARNWLPGPCYRQQRLSKTANDNNNSNFPWTAASKYHLNGRDSLVNPGPAMASHKDDEEKFFPMHGNLIFGKEGTTASNAELDNVMITDEEEIRTTNPVATEQYGTVANNLQSSNTAPTTRTVNDQGALPGMVWQDRDVYLQGPIWAKIPHTDGHFHPSPLMGGFGLKHPPPQIMIKNTPVPANPPTTFSPAKFASFITQYSTGQVSVEIEWELQKENSKRWNPEIQYTSNYNKSVNVDFTVDTNGVYSEPRPIGTRYLTRNL

SEQ ID NO: 5091 - protein, 624 aa, Adeno-associated virus 3B
MPGFYEIVLKVPSDLDEHLPGISNSFVNWVAEKEWELPPDSDMDPNLIEQAPLTVAEKLQREFLVEWRRVSKAPEALFFVQFEKGETYFHLHVLIETIGVKSMVVGRYVSQIKEKLVTRIYRGVEPQLPNWFAVTKTRNGAGGGNKVVDDCYIPNYLLPKTQPELQWAWTNMDQYLSACLNLAERKRLVAQHLTHVSQTQEQNKENQNPNSDAPVIRSKTSARYMELVGWLVDRGITSEKQWIQEDQASYISFNAASNSRSQIKAALDNASKIMSLTKTAPDYLVGSNPPEDITKNRIYQILELNGYDPQYAASVFLGWAQKKFGKRNTIWLFGPATTGKTNIAEAIAHAVPFYGCVNWTNENFPFNDCVDKMVIWWEEGKMTAKVVESAKAILGGSKVRVDQKCKSSAQIEPTPVIVTSNTNMCAVIDGNSTTFEHQQPLQDRMFKFELTRRLDHDFGKVTKQEVKDFFRWASDHVTDVAHEFYVRKGGAKKRPASNDADVSEPKRQCTSLAQPTTSDAEAPADYADRYQNKCSRHVGMNLMLFPCKTCERMNQISNVCFTHGQRDCGECFPGMSESQPVSVVKKKTYQKLCPIHHILGRAPEIACSACDLANVDLDDCVSEQ

SEQ ID NO: 5092 - DNA, 4722 bp, Adeno-associated virus 3B
  source 1..4722: mol_type = genomic DNA
tggccactccctctatgcgcactcgctcgctcggtggggcctggcgaccaaaggtcgccagacggacgtgctttgcacgtccggccccaccgagcgagcgagtgcgcatagagggagtggccaactccatcactagaggtatggcagtgacgtaacgcgaagcgcgcgaagcgagaccacgcctaccagctgcgtcagcagtcaggtgacccttttgcgacagtttgcgacaccacgtggccgctgagggtatatattctcgagtgagcgaaccaggagctccattttgaccgcgaaatttgaacgagcagcagccatgccggggttctacgagattgtcctgaaggtcccgagtgacctggacgagcacctgccgggcatttctaactcgtttgttaactgggtggccgagaaggaatgggagctgccgccggattctgacatggatccgaatctgattgagcaggcacccctgaccgtggccgaaaagcttcagcgcgagttcctggtggagtggcgccgcgtgagtaaggccccggaggccctcttttttgtccagttcgaaaagggggagacctacttccacctgcacgtgctgattgagaccatcggggtcaaatccatggtggtcggccgctacgtgagccagattaaagagaagctggtgacccgcatctaccgcggggtcgagccgcagcttccgaactggttcgcggtgaccaaaacgcgaaatggcgccgggggcgggaacaaggtggtggacgactgctacatccccaactacctgctccccaagacccagcccgagctccagtgggcgtggactaacatggaccagtatttaagcgcctgtttgaatctcgcggagcgtaaacggctggtggcgcagcatctgacgcacgtgtcgcagacgcaggagcagaacaaagagaatcagaaccccaattctgacgcgccggtcatcaggtcaaaaacctcagccaggtacatggagctggtcgggtggctggtggaccgcgggatcacgtcagaaaagcaatggattcaggaggaccaggcctcgtacatctccttcaacgccgcctccaactcgcggtcccagatcaaggccgcgctggacaatgcctccaagatcatgagcctgacaaagacggctccggactacctggtgggcagcaacccgccggaggacattaccaaaaatcggatctaccaaatcctggagctgaacgggtacgatccgcagtacgcggcctccgtcttcctgggctgggcgcaaaagaagttcgggaagaggaacaccatctggctctttgggccggccacgacgggtaaaaccaacatcgcggaagccatcgcccacgccgtgcccttctacggctgcgtaaactggaccaatgagaactttcccttcaacgattgcgtcgacaagatggtgatctggtgggaggagggcaagatgacggccaaggtcgtggagagcgccaaggccattctgggcggaagcaaggtgcgcgtggaccaaaagtgcaagtcatcggcccagatcgaacccactcccgtgatcgtcacctccaacaccaacatgtgcgccgtgattgacgggaacagcaccaccttcgagcatcagcagccgctgcaggaccggatgtttaaatttgaacttacccgccgtttggaccatgactttgggaaggtcaccaaacaggaagtaaaggactttttccggtgggcttccgatcacgtgactgacgtggctcatgagttctacgtcagaaagggtggagctaagaaacgccccgcctccaatgacgcggatgtaagcgagccaaaacggcagtgcacgtcacttgcgcagccgacaacgtcagacgcggaagcaccggcggactacgcggacaggtaccaaaacaaatgttctcgtcacgtgggcatgaatctgatgctttttccctgtaaaacatgcgagagaatgaatcaaatttccaatgtctgttttacgcatggtcaaagagactgtggggaatgcttccctggaatgtcagaatctcaacccgtttctgtcgtcaaaaagaagacttatcagaaactgtgtccaattcatcatatcctgggaagggcacccgagattgcctgttcggcctgcgatttggccaatgtggacttggatgactgtgtttctgagcaataaatgacttaaaccaggtatggctgctgacggttatcttccagattggctcgaggacaacctttctgaaggcattcgtgagtggtgggctctgaaacctggagtccctcaacccaaagcgaaccaacaacaccaggacaaccgtcggggtcttgtgcttccgggttacaaatacctcggacccggtaacggactcgacaaaggagagccggtcaacgaggcggacgcggcagccctcgaacacgacaaagcttacgaccagcagctcaaggccggtgacaacccgtacctcaagtacaaccacgccgacgccgagtttcaggagcgtcttcaagaagatacgtcttttgggggcaaccttggcagagcagtcttccaggccaaaaagaggatccttgagcctcttggtctggttgaggaagcagctaaaacggctcctggaaagaagaggcctgtagatcagtctcctcaggaaccggactcatcatctggtgttggcaaatcgggcaaacagcctgccagaaaaagactaaatttcggtcagactggcgactcagagtcagtcccagaccctcaacctctcggagaaccaccagcagcccccacaagtttgggatctaatacaatggcttcaggcggtggcgcaccaatggcagacaataacgagggtgccgatggagtgggtaattcctcaggaaattggcattgcgattcccaatggctgggcgacagagtcatcaccaccagcaccagaacctgggccctgcccacttacaacaaccatctctacaagcaaatctccagccaatcaggagcttcaaacgacaaccactactttggctacagcaccccttgggggtattttgactttaacagattccactgccacttctcaccacgtgactggcagcgactcattaacaacaactggggattccggcccaagaaactcagcttcaagctcttcaacatccaagttaaagaggtcacgcagaacgatggcacgacgactattgccaataaccttaccagcacggttcaagtgtttacggactcggagtatcagctcccgtacgtgctcgggtcggcgcaccaaggctgtctcccgccgtttccagcggacgtcttcatggtccctcagtatggatacctcaccctgaacaacggaagtcaagcggtgggacgctcatccttttactgcctggagtacttcccttcgcagatgctaaggactggaaataacttccaattcagctataccttcgaggatgtaccttttcacagcagctacgctcacagccagagtttggatcgcttgatgaatcctcttattgatcagtatctgtactacctgaacagaacgcaaggaacaacctctggaacaaccaaccaatcacggctgctttttagccaggctgggcctcagtctatgtctttgcaggccagaaattggctacctgggccctgctaccggcaacagagactttcaaagactgctaacgacaacaacaacagtaactttccttggacagcggccagcaaatatcatctcaatggccgcgactcgctggtgaatccaggaccagctatggccagtcacaaggacgatgaagaaaaatttttccctatgcacggcaatctaatatttggcaaagaagggacaacggcaagtaacgcagaattagataatgtaatgattacggatgaagaagagattcgtaccaccaatcctgtggcaacagagcagtatggaactgtggcaaataacttgcagagctcaaatacagctcccacgactagaactgtcaatgatcagggggccttacctggcatggtgtggcaagatcgtgacgtgtaccttcaaggacctatctgggcaaagattcctcacacggatggacactttcatccttctcctctgatgggaggctttggactgaaacatccgcctcctcaaatcatgatcaaaaatactccggtaccggcaaatcctccgacgactttcagcccggccaagtttgcttcatttatcactcagtactccactggacaggtcagcgtggaaattgagtgggagctacagaaagaaaacagcaaacgttggaatccagagattcagtacacttccaactacaacaagtctgttaatgtggactttactgtagacactaatggtgtttatagtgaacctcgccctattggaacccggtatctcacacgaaacttgtaatcctggttaatcaataaaccgtttaattcgtttcagttgaactttggctcttgtgcacttcttatcttatcttgtttccatggctactgcgtagataagcagcggcctgcggcgcttgcgcttcgcggtttacaactgctggttaatatttaactctcgccatacctctagtgatggagttggccactccctctatgcgcactcgctcgctcggtggggccggacgtgcaaagcacgtccgtctggcgacctttggtcgccaggccccaccgagcgagcgagtgcgcatagagggagtggccaa

SEQ ID NO: 5093 - DNA, 1800 bp, Adeno-associated virus 4
  source 1..1800: mol_type = genomic DNA
acggctcctggaaagaagagaccgttgattgaatccccccagcagcccgactcctccacgggtatcggcaaaaaaggcaagcagccggctaaaaagaagctcgttttcgaagacgaaactggagcaggcgacggaccccctgagggatcaacttccggagccatgtctgatgacagtgagatgcgtgcagcagctggcggagctgcagtcgagggsggacaaggtgccgatggagtgggtaatgcctcgggtgattggcattgcgattccacctggtctgagggccacgtcacgaccaccagcaccagaacctgggtcttgcccacctacaacaaccacctntacaagcgactcggagagagcctgcagtccaacacctacaacggattctccaccccctggggatactttgacttcaaccgcttccactgccacttctcaccacgtgactggcagcgactcatcaacaacaactggggcatgcgacccaaagccatgcgggtcaaaatcttcaacatccaggtcaaggaggtcacgacgtcgaacggcgagacaacggtggctaataaccttaccagcacggttcagatctttgcggactcgtcgtacgaactgccgtacgtgatggatgcgggtcaagagggcagcctgcctccttttcccaacgacgtctttatggtgccccagtacggctactgtggactggtgaccggcaacacttcgcagcaacagactgacagaaatgccttctactgcctggagtactttccttcgcagatgctgcggactggcaacaactttgaaattacgtacagttttgagaaggtgcctttccactcgatgtacgcgcacagccagagcctggaccggctgatgaaccctctcatcgaccagtacctgtggggactgcaatcgaccaccaccggaaccaccctgaatgccgggactgccaccaccaactttaccaagctgcggcctaccaacttttccaactttaaaaagaactggctgcccgggccttcaatcaagcagcagggcttctcaaagactgccaatcaaaactacaagatccctgccaccgggtcagacagtctcatcaaatacgagacgcacagcactctggacggaagatggagtgccctgacccccggacctccaatggccacggctggacctgcggacagcaagttcagcaacagccagctcatctttgcggggcctaaacagaacggcaacacggccaccgtacccgggactctgatcttcacctctgaggaggagctggcagccaccaacgccaccgatacggacatgtggggcaacctacctggcggtgaccagagcaacagcaacctgccgaccgtggacagactgacagccttgggagccgtgcctggaatggtctggcaaaacagagacatttactaccagggtcccatttgggccaagattcctcataccgatggacactttcacccctcaccgctgattggtgggtttgggctgaaacacccgcctcctcaaatttttatcaagaacaccccggtacctgcgaatcctgcaacgaccttcagctctactccggtaaactccttcattactcagtacagcactggccaggtgtcggtgcagattgactgggagatccagaaggagcggtccaaacgctggaaccccgaggtccagtttacctccaactacggacagcaaaactctctgttgtgggctcccgatgcggctgggaaatacactgagcctagggctatcggtacccgctacctcacccaccacctgtaataa

SEQ ID NO: 5094 - DNA, 2208 bp, Adeno-associated virus 4
  source 1..2208: mol_type = genomic DNA
atgactgacggttaccttccagattggctagaggacaacctctctgaaggcgttcgagagtggtgggcgctgcaacctggagcccctaaacccaaggcaaatcaacaacatcaggacaacgctcggggtcttgtgcttccgggttacaaatacctcggacccggcaacggactcgacaagggggaacccgtcaacgcagcggacgcggcagccctcgagcacgacaaggcctacgaccagcagctcaaggccggtgacaacccctacctcaagtacaaccacgccgacgcggagttccagcagcggcttcagggcgacacatcgtttgggggcaacctcggcagagcagtcttccaggccaaaaagagggttcttgaacctcttggtctggttgagcaagcgggtgagacggctcctggaaagaagagaccgttgattgaatccccccagcagcccgactcctccacgggtatcggcaaaaaaggcaagcagccggctaaaaagaagctcgttttcgaagacgaaactggagcaggcgacggaccccctgagggatcaacttccggagccatgtctgatgacagtgagatgcgtgcagcagctggcggagctgcagtcgagggsggacaaggtgccgatggagtgggtaatgcctcgggtgattggcattgcgattccacctggtctgagggccacgtcacgaccaccagcaccagaacctgggtcttgcccacctacaacaaccacctntacaagcgactcggagagagcctgcagtccaacacctacaacggattctccaccccctggggatactttgacttcaaccgcttccactgccacttctcaccacgtgactggcagcgactcatcaacaacaactggggcatgcgacccaaagccatgcgggtcaaaatcttcaacatccaggtcaaggaggtcacgacgtcgaacggcgagacaacggtggctaataaccttaccagcacggttcagatctttgcggactcgtcgtacgaactgccgtacgtgatggatgcgggtcaagagggcagcctgcctccttttcccaacgacgtctttatggtgccccagtacggctactgtggactggtgaccggcaacacttcgcagcaacagactgacagaaatgccttctactgcctggagtactttccttcgcagatgctgcggactggcaacaactttgaaattacgtacagttttgagaaggtgcctttccactcgatgtacgcgcacagccagagcctggaccggctgatgaaccctctcatcgaccagtacctgtggggactgcaatcgaccaccaccggaaccaccctgaatgccgggactgccaccaccaactttaccaagctgcggcctaccaacttttccaactttaaaaagaactggctgcccgggccttcaatcaagcagcagggcttctcaaagactgccaatcaaaactacaagatccctgccaccgggtcagacagtctcatcaaatacgagacgcacagcactctggacggaagatggagtgccctgacccccggacctccaatggccacggctggacctgcggacagcaagttcagcaacagccagctcatctttgcggggcctaaacagaacggcaacacggccaccgtacccgggactctgatcttcacctctgaggaggagctggcagccaccaacgccaccgatacggacatgtggggcaacctacctggcggtgaccagagcaacagcaacctgccgaccgtggacagactgacagccttgggagccgtgcctggaatggtctggcaaaacagagacatttactaccagggtcccatttgggccaagattcctcataccgatggacactttcacccctcaccgctgattggtgggtttgggctgaaacacccgcctcctcaaatttttatcaagaacaccccggtacctgcgaatcctgcaacgaccttcagctctactccggtaaactccttcattactcagtacagcactggccaggtgtcggtgcagattgactgggagatccagaaggagcggtccaaacgctggaaccccgaggtccagtttacctccaactacggacagcaaaactctctgttgtgggctcccgatgcggctgggaaatacactgagcctagggctatcggtacccgctacctcacccaccacctgtaataa

SEQ ID NO: 5095 - DNA, 1872 bp, Adeno-associated virus 4
  source 1..1872: mol_type = genomic DNA
atgccggggttctacgagatcgtgctgaaggtgcccagcgacctggacgagcacctgcccggcatttctgactcttttgtgagctgggtggccgagaaggaatgggagctgccgccggattctgacatggacttgaatctgattgagcaggcacccctgaccgtggccgaaaagctgcaacgcgagttcctggtcgagtggcgccgcgtgagtaaggccccggaggccctcttctttgtccagttcgagaagggggacagctacttccacctgcacatcctggtggagaccgtgggcgtcaaatccatggtggtgggccgctacgtgagccagattaaagagaagctggtgacccgcatctaccgcggggtcgagccgcagcttccgaactggttcgcggtgaccaagacgcgtaatggcgccggaggcgggaacaaggtggtggacgactgctacatccccaactacctgctccccaagacccagcccgagctccagtgggcgtggactaacatggaccagtatataagcgcctgtttgaatctcgcggagcgtaaacggctggtggcgcagcatctgacgcacgtgtcgcagacgcaggagcagaacaaggaaaaccagaaccccaattctgacgcgccggtcatcaggtcaaaaacctccgccaggtacatggagctggtcgggtggctggtggaccgcgggatcacgtcagaaaagcaatggatccaggaggaccaggcgtcctacatctccttcaacgccgcctccaactcgcggtcacaaatcaaggccgcgctggacaatgcctccaaaatcatgagcctgacaaagacggctccggactacctggtgggccagaacccgccggaggacatttccagcaaccgcatctaccgaatcctcgagatgaacgggtacgatccgcagtacgcggcctccgtcttcctgggctgggcgcaaaagaagttcgggaagaggaacaccatctggctctttgggccggccacgacgggtaaaaccaacatcgcggaagccatcgcccacgccgtgcccttctacggctgcgtgaactggaccaatgagaactttccgttcaacgattgcgtcgacaagatggtgatctggtgggaggagggcaagatgacggccaaggtcgtagagagcgccaaggccatcctgggcggaagcaaggtgcgcgtggaccaaaagtgcaagtcatcggcccagatcgacccaactcccgtgatcgtcacctccaacaccaacatgtgcgcggtcatcgacggaaactcgaccaccttcgagcaccaacaaccactccaggaccggatgttcaagttcgagctcaccaagcgcctggagcacgactttggcaaggtcaccaagcaggaagtcaaagactttttccggtgggcgtcagatcacgtgaccgaggtgactcacgagttttacgtcagaaagggtggagctagaaagaggcccgcccccaatgacgcagatataagtgagcccaagcgggcctgtccgtcagttgcgcagccatcgacgtcagacgcggaagctccggtggactacgcggacaggtaccaaaacaaatgttctcgtcacgtgggtatgaatctgatgctttttccctgccggcaatgcgagagaatgaatcagaatgtggacatttgcttcacgcacggggtcatggactgtgccgagtgcttccccgtgtcagaatctcaacccgtgtctgtcgtcagaaagcggacgtatcagaaactgtgtccgattcatcacatcatggggagggcgcccgaggtggcctgctcggcctgcgaactggccaatgtggacttggatgactgtgacatggaacaataa

SEQ ID NO: 5096 - DNA, 1611 bp, Adeno-associated virus 4
  source 1..1611: mol_type = genomic DNA
atgccggggttctacgagatcgtgctgaaggtgcccagcgacctggacgagcacctgcccggcatttctgactcttttgtgagctgggtggccgagaaggaatgggagctgccgccggattctgacatggacttgaatctgattgagcaggcacccctgaccgtggccgaaaagctgcaacgcgagttcctggtcgagtggcgccgcgtgagtaaggccccggaggccctcttctttgtccagttcgagaagggggacagctacttccacctgcacatcctggtggagaccgtgggcgtcaaatccatggtggtgggccgctacgtgagccagattaaagagaagctggtgacccgcatctaccgcggggtcgagccgcagcttccgaactggttcgcggtgaccaagacgcgtaatggcgccggaggcgggaacaaggtggtggacgactgctacatccccaactacctgctccccaagacccagcccgagctccagtgggcgtggactaacatggaccagtatataagcgcctgtttgaatctcgcggagcgtaaacggctggtggcgcagcatctgacgcacgtgtcgcagacgcaggagcagaacaaggaaaaccagaaccccaattctgacgcgccggtcatcaggtcaaaaacctccgccaggtacatggagctggtcgggtggctggtggaccgcgggatcacgtcagaaaagcaatggatccaggaggaccaggcgtcctacatctccttcaacgccgcctccaactcgcggtcacaaatcaaggccgcgctggacaatgcctccaaaatcatgagcctgacaaagacggctccggactacctggtgggccagaacccgccggaggacatttccagcaaccgcatctaccgaatcctcgagatgaacgggtacgatccgcagtacgcggcctccgtcttcctgggctgggcgcaaaagaagttcgggaagaggaacaccatctggctctttgggccggccacgacgggtaaaaccaacatcgcggaagccatcgcccacgccgtgcccttctacggctgcgtgaactggaccaatgagaactttccgttcaacgattgcgtcgacaagatggtgatctggtgggaggagggcaagatgacggccaaggtcgtagagagcgccaaggccatcctgggcggaagcaaggtgcgcgtggaccaaaagtgcaagtcatcggcccagatcgacccaactcccgtgatcgtcacctccaacaccaacatgtgcgcggtcatcgacggaaactcgaccaccttcgagcaccaacaaccactccaggaccggatgttcaagttcgagctcaccaagcgcctggagcacgactttggcaaggtcaccaagcaggaagtcaaagactttttccggtgggcgtcagatcacgtgaccgaggtgactcacgagttttacgtcagaaagggtggagctagaaagaggcccgcccccaatgacgcagatataagtgagcccaagcgggcctgtccgtcagttgcgcagccatcgacgtcagacgcggaagctccggtggactacgcggacagattggctagaggacaacctctctga

SEQ ID NO: 5097 - DNA, 1872 bp, Adeno-associated virus 4; identical to SEQ ID NO: 5095
  source 1..1872: mol_type = genomic DNA

SEQ ID NO: 5098 - DNA, 1617 bp, Adeno-associated virus 4
  source 1..1617: mol_type = genomic DNA
atgcgtgcagcagctggcggagctgcagtcgagggsggacaaggtgccgatggagtgggtaatgcctcgggtgattggcattgcgattccacctggtctgagggccacgtcacgaccaccagcaccagaacctgggtcttgcccacctacaacaaccacctntacaagcgactcggagagagcctgcagtccaacacctacaacggattctccaccccctggggatactttgacttcaaccgcttccactgccacttctcaccacgtgactggcagcgactcatcaacaacaactggggcatgcgacccaaagccatgcgggtcaaaatcttcaacatccaggtcaaggaggtcacgacgtcgaacggcgagacaacggtggctaataaccttaccagcacggttcagatctttgcggactcgtcgtacgaactgccgtacgtgatggatgcgggtcaagagggcagcctgcctccttttcccaacgacgtctttatggtgccccagtacggctactgtggactggtgaccggcaacacttcgcagcaacagactgacagaaatgccttctactgcctggagtactttccttcgcagatgctgcggactggcaacaactttgaaattacgtacagttttgagaaggtgcctttccactcgatgtacgcgcacagccagagcctggaccggctgatgaaccctctcatcgaccagtacctgtggggactgcaatcgaccaccaccggaaccaccctgaatgccgggactgccaccaccaactttaccaagctgcggcctaccaacttttccaactttaaaaagaactggctgcccgggccttcaatcaagcagcagggcttctcaaagactgccaatcaaaactacaagatccctgccaccgggtcagacagtctcatcaaatacgagacgcacagcactctggacggaagatggagtgccctgacccccggacctccaatggccacggctggacctgcggacagcaagttcagcaacagccagctcatctttgcggggcctaaacagaacggcaacacggccaccgtacccgggactctgatcttcacctctgaggaggagctggcagccaccaacgccaccgatacggacatgtggggcaacctacctggcggtgaccagagcaacagcaacctgccgaccgtggacagactgacagccttgggagccgtgcctggaatggtctggcaaaacagagacatttactaccagggtcccatttgggccaagattcctcataccgatggacactttcacccctcaccgctgattggtgggtttgggctgaaacacccgcctcctcaaatttttatcaagaacaccccggtacctgcgaatcctgcaacgaccttcagctctactccggtaaactccttcattactcagtacagcactggccaggtgtcggtgcagattgactgggagatccagaaggagcggtccaaacgctggaaccccgaggtccagtttacctccaactacggacagcaaaactctctgttgtgggctcccgatgcggctgggaaatacactgagcctagggctatcggtacccgctacctcacccaccacctgtaa

SEQ ID NO: 5099 - DNA, 939 bp, Adeno-associated virus 4
  source 1..939: mol_type = genomic DNA
atggagctggtcgggtggctggtggaccgcgggatcacgtcagaaaagcaatggatccaggaggaccaggcgtcctacatctccttcaacgccgcctccaactcgcggtcacaaatcaaggccgcgctggacaatgcctccaaaatcatgagcctgacaaagacggctccggactacctggtgggccagaacccgccggaggacatttccagcaaccgcatctaccgaatcctcgagatgaacgggtacgatccgcagtacgcggcctccgtcttcctgggctgggcgcaaaagaagttcgggaagaggaacaccatctggctctttgggccggccacgacgggtaaaaccaacatcgcggaagccatcgcccacgccgtgcccttctacggctgcgtgaactggaccaatgagaactttccgttcaacgattgcgtcgacaagatggtgatctggtgggaggagggcaagatgacggccaaggtcgtagagagcgccaaggccatcctgggcggaagcaaggtgcgcgtggaccaaaagtgcaagtcatcggcccagatcgacccaactcccgtgatcgtcacctccaacaccaacatgtgcgcggtcatcgacggaaactcgaccaccttcgagcaccaacaaccactccaggaccggatgttcaagttcgagctcaccaagcgcctggagcacgactttggcaaggtcaccaagcaggaagtcaaagactttttccggtgggcgtcagatcacgtgaccgaggtgactcacgagttttacgtcagaaagggtggagctagaaagaggcccgcccccaatgacgcagatataagtgagcccaagcgggcctgtccgtcagttgcgcagccatcgacgtcagacgcggaagctccggtggactacgcggacagattggctagaggacaacctctctga

SEQ ID NO: 5100 - DNA, 1197 bp, Adeno-associated virus 4
  source 1..1197: mol_type = genomic DNA
atggagctggtcgggtggctggtggaccgcgggatcacgtcagaaaagcaatggatccaggaggaccaggcgtcctacatctccttcaacgccgcctccaactcgcggtcacaaatcaaggccgcgctggacaatgcctccaaaatcatgagcctgacaaagacggctccggactacctggtgggccagaacccgccggaggacatttccagcaaccgcatctaccgaatcctcgagatgaacgggtacgatccgcagtacgcggcctccgtcttcctgggctgggcgcaaaagaagttcgggaagaggaacaccatctggctctttgggccggccacgacgggtaaaaccaacatcgcggaagccatcgcccacgccgtgcccttctacggctgcgtgaactggaccaatgagaactttccgttcaacgattgcgtcgacaagatggtgatctggtgggaggagggcaagatgacggccaaggtcgtagagagcgccaaggccatcctgggcggaagcaaggtgcgcgtggaccaaaagtgcaagtcatcggcccagatcgacccaactcccgtgatcgtcacctccaacaccaacatgtgcgcggtcatcgacggaaactcgaccaccttcgagcaccaacaaccactccaggaccggatgttcaagttcgagctcaccaagcgcctggagcacgactttggcaaggtcaccaagcaggaagtcaaagactttttccggtgggcgtcagatcacgtgaccgaggtgactcacgagttttacgtcagaaagggtggagctagaaagaggcccgcccccaatgacgcagatataagtgagcccaagcgggcctgtccgtcagttgcgcagccatcgacgtcagacgcggaagctccggtggactacgcggacaggtaccaaaacaaatgttctcgtcacgtgggtatgaatctgatgctttttccctgccggcaatgcgagagaatgaatcagaatgtggacatttgcttcacgcacggggtcatggactgtgccgagtgcttccccgtgtcagaatctcaacccgtgtctgtcgtcagaaagcggacgtatcagaaactgtgtccgattcatcacatcatggggagggcgcccgaggtggcctgctcggcctgcgaactggccaatgtggacttggatgactgtgacatggaacaa

SEQ ID NO: 5101 - DNA, 245 bp, Adeno-associated virus 4
  source 1..245: mol_type = genomic DNA
ctccatcatctaggtttgcccactgacgtcaatgtgacgtcctagggttagggaggtccctgtattagcagtcacgtgagtgtcgtatttcgcggagcgtagcggagcgcataccaagctgccacgtcacagccacgtggtccgtttgcgacagtttgcgacaccatgtggtcaggagggtatataaccgcgagtgagccagcgaggagctccattttgcccgcgaattttgaacgagcagcagc

SEQ ID NO: 5102 - protein, 313 aa, Adeno-associated virus 4
MELVGWLVDRGITSEKQWIQEDQASYISFNAASNSRSQIKAALDNASKIMSLTKTAPDYLVGQNPPEDISSNRIYRILEMNGYDPQYAASVFLGWAQKKFGKRNTIWLFGPATTGKTNIAEAIAHAVPFYGCVNWTNENFPFNDCVDKMVIWWEEGKMTAKVVESAKAILGGSKVRVDQKCKSSAQIDPTPVIVTSNTNMCAVIDGNSTTFEHQQPLQDRMFKFELTKRLEHDFGKVTKQEVKDFFRWASDHVTEVTHEFYVRKGGARKRPAPNDADISEPKRACPSVAQPSTSDAEAPVDYADRLARGQPLX

SEQ ID NO: 5103 - protein, 399 aa, Adeno-associated virus
  source 1..399: note = 4
MELVGWLVDRGITSEKQWIQEDQASYISFNAASNSRSQIKAALDNASKIMSLTKTAPDYLVGQNPPEDISSNRIYRILEMNGYDPQYAASVFLGWAQKKFGKRNTIWLFGPATTGKTNIAEAIAHAVPFYGCVNWTNENFPFNDCVDKMVIWWEEGKMTAKVVESAKAILGGSKVRVDQKCKSSAQIDPTPVIVTSNTNMCAVIDGNSTTFEHQQPLQDRMFKFELTKRLEHDFGKVTKQEVKDFFRWASDHVTEVTHEFYVRKGGARKRPAPNDADISEPKRACPSVAQPSTSDAEAPVDYADRYQNKCSRHVGMNLMLFPCRQCERMNQNVDICFTHGVMDCAECFPVSESQPVSVVRKRTYQKLCPIHHIMGRAPEVACSACELANVDLDDCDMEQ

SEQ ID NO: 5104 - protein, 623 aa, Adeno-associated virus 4
MPGFYEIVLKVPSDLDEHLPGISDSFVSWVAEKEWELPPDSDMDLNLIEQAPLTVAEKLQREFLVEWRRVSKAPEALFFVQFEKGDSYFHLHILVETVGVKSMVVGRYVSQIKEKLVTRIYRGVEPQLPNWFAVTKTRNGAGGGNKVVDDCYIPNYLLPKTQPELQWAWTNMDQYISACLNLAERKRLVAQHLTHVSQTQEQNKENQNPNSDAPVIRSKTSARYMELVGWLVDRGITSEKQWIQEDQASYISFNAASNSRSQIKAALDNASKIMSLTKTAPDYLVGQNPPEDISSNRIYRILEMNGYDPQYAASVFLGWAQKKFGKRNTIWLFGPATTGKTNIAEAIAHAVPFYGCVNWTNENFPFNDCVDKMVIWWEEGKMTAKVVESAKAILGGSKVRVDQKCKSSAQIDPTPVIVTSNTNMCAVIDGNSTTFEHQQPLQDRMFKFELTKRLEHDFGKVTKQEVKDFFRWASDHVTEVTHEFYVRKGGARKRPAPNDADISEPKRACPSVAQPSTSDAEAPVDYADRYQNKCSRHVGMNLMLFPCRQCERMNQNVDICFTHGVMDCAECFPVSESQPVSVVRKRTYQKLCPIHHIMGRAPEVACSACELANVDLDDCDMEQ

SEQ ID NO: 5105 - protein, 537 aa, Adeno-associated virus 4
MPGFYEIVLKVPSDLDEHLPGISDSFVSWVAEKEWELPPDSDMDLNLIEQAPLTVAEKLQREFLVEWRRVSKAPEALFFVQFEKGDSYFHLHILVETVGVKSMVVGRYVSQIKEKLVTRIYRGVEPQLPNWFAVTKTRNGAGGGNKVVDDCYIPNYLLPKTQPELQWAWTNMDQYISACLNLAERKRLVAQHLTHVSQTQEQNKENQNPNSDAPVIRSKTSARYMELVGWLVDRGITSEKQWIQEDQASYISFNAASNSRSQIKAALDNASKIMSLTKTAPDYLVGQNPPEDISSNRIYRILEMNGYDPQYAASVFLGWAQKKFGKRNTIWLFGPATTGKTNIAEAIAHAVPFYGCVNWTNENFPFNDCVDKMVIWWEEGKMTAKVVESAKAILGGSKVRVDQKCKSSAQIDPTPVIVTSNTNMCAVIDGNSTTFEHQQPLQDRMFKFELTKRLEHDFGKVTKQEVKDFFRWASDHVTEVTHEFYVRKGGARKRPAPNDADISEPKRACPSVAQPSTSDAEAPVDYADRLARGQPLX

SEQ ID NO: 5106 - protein, 623 aa, Adeno-associated virus 4; identical to SEQ ID NO: 5104

SEQ ID NO: 5107 - protein, 544 aa, Adeno-associated virus 4
MSDDSEMRAAAGGAAVEGGQGADGVGNASGDWHCDSTWSEGHVTTTSTRTWVLPTYNNHLYKRLGESLQSNTYNGFSTPWGYFDFNRFHCHFSPRDWQRLINNNWGMRPKAMRVKIFNIQVKEVTTSNGETTVANNLTSTVQIFADSSYELPYVMDAGQEGSLPPFPNDVFMVPQYGYCGLVTGNTSQQQTDRNAFYCLEYFPSQMLRTGNNFEITYSFEKVPFHSMYAHSQSLDRLMNPLIDQYLWGLQSTTTGTTLNAGTATTNFTKLRPTNFSNFKKNWLPGPSIKQQGFSKTANQNYKIPATGSDSLIKYETHSTLDGRWSALTPGPPMATAGPADSKFSNSQLIFAGPKQNGNTATVPGTLIFTSEEELAATNATDTDMWGNLPGGDQSNSNLPTVDRLTALGAVPGMVWQNRDIYYQGPIWAKIPHTDGHFHPSPLIGGFGLKHPPPQIFIKNTPVPANPATTFSSTPVNSFITQYSTGQVSVQIDWEIQKERSKRWNPEVQFTSNYGQQNSLLWAPDAAGKYTEPRAIGTRYLTHHL

SEQ ID NO: 5108 - protein, 734 aa, Adeno-associated virus 4; identical to SEQ ID NO: 4754

SEQ ID NO: 5109 - protein, 598 aa, Adeno-associated virus 4
TAPGKKRPLIESPQQPDSSTGIGKKGKQPAKKKLVFEDETGAGDGPPEGSTSGAMSDDSEMRAAAGGAAVEGGQGADGVGNASGDWHCDSTWSEGHVTTTSTRTWVLPTYNNHLYKRLGESLQSNTYNGFSTPWGYFDFNRFHCHFSPRDWQRLINNNWGMRPKAMRVKIFNIQVKEVTTSNGETTVANNLTSTVQIFADSSYELPYVMDAGQEGSLPPFPNDVFMVPQYGYCGLVTGNTSQQQTDRNAFYCLEYFPSQMLRTGNNFEITYSFEKVPFHSMYAHSQSLDRLMNPLIDQYLWGLQSTTTGTTLNAGTATTNFTKLRPTNFSNFKKNWLPGPSIKQQGFSKTANQNYKIPATGSDSLIKYETHSTLDGRWSALTPGPPMATAGPADSKFSNSQLIFAGPKQNGNTATVPGTLIFTSEEELAATNATDTDMWGNLPGGDQSNSNLPTVDRLTALGAVPGMVWQNRDIYYQGPIWAKIPHTDGHFHPSPLIGGFGLKHPPPQIFIKNTPVPANPATTFSSTPVNSFITQYSTGQVSVQIDWEIQKERSKRWNPEVQFTSNYGQQNSLLWAPDAAGKYTEPRAIGTRYLTHHL

SEQ ID NO: 5110 - DNA, 129 bp, Adeno-associated virus 4
  source 1..129: mol_type = genomic DNA
ttggccactccctctatgcgcgctcgctcactcactcggccctgcggccagaggccggcagtctggagacctttggtgtccagggcagggccgagtgagtgagcgagcgcgcatagagggagtggccaa

SEQ ID NO: 5111 - DNA, 125 bp, Adeno-associated virus 4
  source 1..125: mol_type = genomic DNA
ttggccactccctctatgcgcgctcgctcactcactcggccctggagaccaaaggtctccagactgccggcctctggccggcagggccgagtgagtgagcgagcgcgcatagagggagtggccaa

SEQ ID NO: 5112 - DNA, 4768 bp, Adeno-associated virus 4
  source 1..4768: mol_type = genomic DNA
ttggccactccctctatgcgcgctcgctcactcactcggccctggagaccaaaggtctccagactgccggcctctggccggcagggccgagtgagtgagcgagcgcgcatagagggagtggccaactccatcatctaggtttgcccactgacgtcaatgtgacgtcctagggttagggaggtccctgtattagcagtcacgtgagtgtcgtatttcgcggagcgtagcggagcgcataccaagctgccacgtcacagccacgtggtccgtttgcgacagtttgcgacaccatgtggtcaggagggtatataaccgcgagtgagccagcgaggagctccattttgcccgcgaattttgaacgagcagcagccatgccggggttctacgagatcgtgctgaaggtgcccagcgacctggacgagcacctgcccggcatttctgactcttttgtgagctgggtggccgagaaggaatgggagctgccgccggattctgacatggacttgaatctgattgagcaggcacccctgaccgtggccgaaaagctgcaacgcgagttcctggtcgagtggcgccgcgtgagtaaggccccggaggccctcttctttgtccagttcgagaagggggacagctacttccacctgcacatcctggtggagaccgtgggcgtcaaatccatggtggtgggccgctacgtgagccagattaaagagaagctggtgacccgcatctaccgcggggtcgagccgcagcttccgaactggttcgcggtgaccaagacgcgtaatggcgccggaggcgggaacaaggtggtggacgactgctacatccccaactacctgctccccaagacccagcccgagctccagtgggcgtggactaacatggaccagtatataagcgcctgtttgaatctcgcggagcgtaaacggctggtggcgcagcatctgacgcacgtgtcgcagacgcaggagcagaacaaggaaaaccagaaccccaattctgacgcgccggtcatcaggtcaaaaacctccgccaggtacatggagctggtcgggtggctggtggaccgcgggatcacgtcagaaaagcaatggatccaggaggaccaggcgtcctacatctccttcaacgccgcctccaactcgcggtcacaaatcaaggccgcgctggacaatgcctccaaaatcatgagcctgacaaagacggctccggactacctggtgggccagaacccgccggaggacatttccagcaaccgcatctaccgaatcctcgagatgaacgggtacgatccgcagtacgcggcctccgtcttcctgggctgggcgcaaaagaagttcgggaagaggaacaccatctggctctttgggccggccacgacgggtaaaaccaacatcgcggaagccatcgcccacgccgtgcccttctacggctgcgtgaactggaccaatgagaactttccgttcaacgattgcgtcgacaagatggtgatctggtgggaggagggcaagatgacggccaaggtcgtagagagcgccaaggccatcctgggcggaagcaaggtgcgcgtggaccaaaagtgcaagtcatcggcccagatcgacccaactcccgtgatcgtcacctccaacaccaacatgtgcgcggtcatcgacggaaactcgaccaccttcgagcaccaacaaccactccaggaccggatgttcaagttcgagctcaccaagcgcctggagcacgactttggcaaggtcaccaagcaggaagtcaaagactttttccggtgggcgtcagatcacgtgaccgaggtgactcacgagttttacgtcagaaagggtggagctagaaagaggcccgcccccaatgacgcagatataagtgagcccaagcgggcctgtccgtcagttgcgcagccatcgacgtcagacgcggaagctccggtggactacgcggacaggtaccaaaacaaatgttctcgtcacgtgggtatgaatctgatgctttttccctgccggcaatgcgagagaatgaatcagaatgtggacatttgcttcacgcacggggtcatggactgtgccgagtgcttccccgtgtcagaatctcaacccgtgtctgtcgtcagaaagcggacgtatcagaaactgtgtccgattcatcacatcatggggagggcgcccgaggtggcctgctcggcctgcgaactggccaatgtggacttggatgactgtgacatggaacaataaatgactcaaaccagatatgactgacggttaccttccagattggctagaggacaacctctctgaaggcgttcgagagtggtgggcgctgcaacctggagcccctaaacccaaggcaaatcaacaacatcaggacaacgctcggggtcttgtgcttccgggttacaaatacctcggacccggcaacggactcgacaagggggaacccgtcaacgcagcggacgcggcagccctcgagcacgacaaggcctacgaccagcagctcaaggccggtgacaacccctacctcaagtacaaccacgccgacgcggagttccagcagcggcttcagggcgacacaccgtttgggggcaacctcggcagagcagtcttccaggccaaaaagagggttcttgaacctcttggtctggttgagcaagcgggtgagacggctcctggaaagaagagaccgttgattgaatccccccagcagcccgactcctccacgggtatcggcaaaaaaggcaagcagccggctaaaaagaagctcgttttcgaagacgaaactggagcaggcgacggaccccctgagggatcaacttccggagccatgtctgatgacagtgagatgcgtgcagcagctggcggagctgcagtcgagggsggacaaggtgccgatggagtgggtaatgcctcgggtgattggcattgcgattccacctggtctgagggccacgtcacgaccaccagcaccagaacctgggtcttgcccacctacaacaaccacctntacaagcgactcggagagagcctgcagtccaacacctacaacggattctccaccccctggggatactttgacttcaaccgcttccactgccacttctcaccacgtgactggcagcgactcatcaacaacaactggggcatgcgacccaaagccatgcgggtcaaaatcttcaacatccaggtcaaggaggtcacgacgtcgaacggcgagacaacggtggctaataaccttaccagcacggttcagatctttgcggactcgtcgtacgaactgccgtacgtgatggatgcgggtcaagagggcagcctgcctccttttcccaacgacgtctttatggtgccccagtacggctactgtggactggtgaccggcaacacttcgcagcaacagactgacagaaatgccttctactgcctggagtactttccttcgcagatgctgcggactggcaacaactttgaaattacgtacagttttgagaaggtgcctttccactcgatgtacgcgcacagccagagcctggaccggctgatgaaccctctcatcgaccagtacctgtggggactgcaatcgaccaccaccggaaccaccctgaatgccgggactgccaccaccaactttaccaagctgcggcctaccaacttttccaactttaaaaagaactggctgcccgggccttcaatcaagcagcagggcttctcaaagactgccaatcaaaactacaagatccctgccaccgggtcagacagtctcatcaaatacgagacgcacagcactctggacggaagatggagtgccctgacccccggacctccaatggccacggctggacctgcggacagcaagttcagcaacagccagctcatctttgcggggcctaaacagaacggcaacacggccaccgtacccgggactctgatcttcacctctgaggaggagctggcagccaccaacgccaccgatacggacatgtggggcaacctacctggcggtgaccagagcaacagcaacctgccgaccgtggacagactgacagccttgggagccgtgcctggaatggtctggcaaaacagagacatttactaccagggtcccatttgggccaagattcctcataccgatggacactttcacccctcaccgctgattggtgggtttgggctgaaacacccgcctcctcaaatttttatcaagaacaccccggtacctgcgaatcctgcaacgaccttcagctctactccggtaaactccttcattactcagtacagcactggccaggtgtcggtgcagattgactgggagatccagaaggagcggtccaaacgctggaaccccgaggtccagtttacctccaactacggacagcaaaactctctgttgtgggctcccgatgcggctgggaaatacactgagcctagggctatcggtacccgctacctcacccaccacctgtaataacctgttaatcaataaaccggtttattcgtttcagttgaactttggtctccgtgtccttcttatcttatctcgtttccatggctactgcgtacataagcagcggcctgcggcgcttgcgcttcgcggtttacaactgccggttaatcagtaacttctggcaaaccatgatgatggagttggccactccctctatgcgcgctcgctcactcactcggccctggagaccaaaggtctccagactgccggcctctggccggcagggccgagtgagtgagcgagcgcgcatagagggagtggccaa

SEQ ID NO: 5113 - protein, 725 aa, Adeno-associated virus 5
MAADGYLPDWLEDTLSEGIRQWWKLKPGPPPPKPAERHKDDSRGLVLPGYKYLGPFNGLDKGEPVNEADAAALEHDKAYDRQLDSGDNPYLKYNHADAEFQERLKEDTSFGGNLGRAVFQAKKRVLEPFGLVEEGAKTAPTGKRIDDHFPKRKKARTEEDSKPSTSSDAEAGPSGSQQLQIPAQPASSLGADTMSAGGGGPLGDNNQGADGVGNASGDWHCDSTWMGDRVVTKSTRTWVLPSYNNHQYREIKSGSVDGSNANAYFGYSTPWGYFDFNRFHSHWSPRDWQRLINNYWGFRPRSLRVKIFNIQVKEVTVQDSTTTIANNLTSTVQVFTDDDYQLPYVVGNGTEGCLPAFPPQVFTLPQYGYATLNRDNTENPTERSSFFCLEYFPSKMLRTGNNFEFTYNFEEVPFHSSFAPSQNLFKLANPLVDQYLYRFVSTNNTGGVQFNKNLAGRYANTYKNWFPGPMGRTQGWNLGSGVNRASVSAFATTNRMELEGASYQVPPQPNGMTNNLQGSNTYALENTMIFNSQPANPGTTATYLEGNMLITSESETQPVNRVAYNVGGQMATNNQSSTTAPTTGTYNLQEIVPGSVWMERDVYLQGPIWAKIPETGAHFHPSPAMGGFGLKHPPPMMLIKNTPVPGNITSFSDVPVSSFITQYSTGQVTVEMEWELKKENSKRWNPEIQYTNNYNDPQFVDFAPDSTGEYRTTRPIGTRYLTRPL

SEQ ID NO: 5114 - protein, 724 aa, Adeno-associated virus 5
MSFVDHPPDWLEEVGEGLREFLGLEAGPPKPKPNQQHQDQARGLVLPGYNYLGPGNGLDRGEPVNRADEVAREHDISYNEQLEAGDNPYLKYNHADAEFQEKLADDTSFGGNLGKAVFQAKKRVLEPFGLVEEGAKTAPTGKRIDDHFPKRKKARTEEDSKPSTSSDAEAGPSGSQQLQIPAQPASSLGADTMSAGGGGPLGDNNQGADGVGNASGDWHCDSTWMGDRVVTKSTRTWVLPSYNNHQYREIKSGSVDGSNANAYFGYSTPWGYFDFNRFHSHWSPRDWQRLINNYWGFRPRSLRVKIFNIQVKEVTVQDSTTTIANNLTSTVQVFTDDDYQLPYVVGNGTEGCLPAFPPQVFTLPQYGYATLNRDNTENPTERSSFFCLEYFPSKMLRTGNNFEFTYNFEEVPFHSSFAPSQNLFKLANPLVDQYLYRFVSTNNTGGVQFNKNLAGRYANTYKNWFPGPMGRTQGWNLGSGVNRASVSAFATTNRMELEGASYQVPPQPNGMTNNLQGSNTYALENTMIFNSQPANPGTTATYLEGNMLITSESETQPVNRVAYNVGGQMATNNQSSTTAPATGTYNLQEIVPGSVWMERDVYLQGPIWAKIPETGAHFHPSPAMGGFGLKHPPPMMLIKNTPVPGNITSFSDVPVSSFITQYSTGQVTVEMEWELKKENSKRWNPEIQYTNNYNDPQFVDFAPDSTGEYRTTRPIGTRYLTRPL

SEQ ID NO: 5115 - protein, 2175 aa, Adeno-associated virus 5
ATGTCTTTTGTTGATCACCCTCCAGATTGGTTGGAAGAAGTTGGTGAAGGTCTTCGCGAGTTTTTGGGCCTTGAAGCGGGCCCACCGAAACCAAAACCCAATCAGCAGCATCAAGATCAAGCCCGTGGTCTTGTGCTGCCTGGTTATAACTATCTCGGACCCGGAAACGGTCTCGATCGAGGAGAGCCTGTCAACAGGGCAGACGAGGTCGCGCGAGAGCACGACATCTCGTACAACGAGCAGCTTGAGGCGGGAGACAACCCCTACCTCAAGTACAACCACGCGGACGCCGAGTTTCAGGAGAAGCTCGCCGACGACACATCCTTCGGGGGAAACCTCGGAAAGGCAGTCTTTCAGGCCAAGAAAAGGGTTCTCGAACCTTTTGGCCTGGTTGAAGAGGGTGCTAAGACGGCCCCTACCGGAAAGCGGATAGACGACCACTTTCCAAAAAGAAAGAAGGCTCGGACCGAAGAGGACTCCAAGCCTTCCACCTCGTCAGACGCCGAAGCTGGACCCAGCGGATCCCAGCAGCTGCAAATCCCAGCCCAACCAGCCTCAAGTTTGGGAGCTGATACAATGTCTGCGGGAGGTGGCGGCCCATTGGGCGACAATAACCAAGGTGCCGATGGAGTGGGCAATGCCTCGGGAGATTGGCATTGCGATTCCACGTGGATGGGGGACAGAGTCGTCACCAAGTCCACCCGAACCTGGGTGCTGCCCAGCTACAACAACCACCAGTACCGAGAGATCAAAAGCGGCTCCGTCGACGGAAGCAACGCCAACGCCTACTTTGGATACAGCACCCCCTGGGGGTACTTTGACTTTAACCGCTTCCACAGCCACTGGAGCCCCCGAGACTGGCAAAGACTCATCAACAACTACTGGGGCTTCAGACCCCGGTCCCTCAGAGTCAAAATCTTCAACATTCAAGTCAAAGAGGTCACGGTGCAGGACTCCACCACCACCATCGCCAACAACCTCACCTCCACCGTCCAAGTGTTTACGGACGACGACTACCAGCTGCCCTACGTCGTCGGCAACGGGACCGAGGGATGCCTGCCGGCCTTCCCTCCGCAGGTCTTTACGCTGCCGCAGTACGGTTACGCGACGCTGAACCGCGACAACACAGAAAATCCCACCGAGAGGAGCAGCTTCTTCTGCCTAGAGTACTTTCCCAGCAAGATGCTGAGAACGGGCAACAACTTTGAGTTTACCTACAACTTTGAGGAGGTGCCCTTCCACTCCAGCTTCGCTCCCAGTCAGAACCTGTTCAAGCTGGCCAACCCGCTGGTGGACCAGTACTTGTACCGCTTCGTGAGCACAAATAACACTGGCGGAGTCCAGTTCAACAAGAACCTGGCCGGGAGATACGCCAACACCTACAAAAACTGGTTCCCGGGGCCCATGGGCCGAACCCAGGGCTGGAACCTGGGCTCCGGGGTCAACCGCGCCAGTGTCAGCGCCTTCGCCACGACCAATAGGATGGAGCTCGAGGGCGCGAGTTACCAGGTGCCCCCGCAGCCGAACGGCATGACCAACAACCTCCAGGGCAGCAACACCTATGCCCTGGAGAACACTATGATCTTCAACAGCCAGCCGGCGAACCCGGGCACCACCGCCACGTACCTCGAGGGCAACATGCTCATCACCAGCGAGAGCGAGACGCAGCCGGTGAACCGCGTGGCGTACAACGTCGGCGGGCAGATGGCCACCAACAACCAGAGCTCCACCACTGCCCCCGCGACCGGCACGTACAACCTCCAGGAAATCGTGCCCGGCAGCGTGTGGATGGAGAGGGACGTGTACCTCCAAGGACCCATCTGGGCCAAGATCCCAGAGACGGGGGCGCACTTTCACCCCTCTCCGGCCATGGGCGGATTCGGACTCAAACACCCACCGCCCATGATGCTCATCAAGAACACGCCTGTGCCCGGAAATATCACCAGCTTCTCGGACGTGCCCGTCAGCAGCTTCATCACCCAGTACAGCACCGGGCAGGTCACCGTGGAGATGGAGTGGGAGCTCAAGAAGGAAAACTCCAAGAGGTGGAACCCAGAGATCCAGTACACAAACAACTACAACGACCCCCAGTTTGTGGACTTTGCCCCGGACAGCACCGGGGAATACAGAACCACCAGACCTATCGGAACCCGATACCTTACCCGACCCCTTTAA

SEQ ID NO: 5116 - DNA, 2208 bp, Adeno-associated virus 6
  source 1..2208: mol_type = genomic DNA
atggctgccgatggttatcttccagattggctcgaggacaacctctctgagggcattcgcgagtggtgggacttgaaacctggagccccgaaacccaaagccaaccagcaaaagcaggacgacggccggggtctggtgcttcctggctacaagtacctcggacccttcaacggactcgacaagggggagcccgtcaacgcggcggatgcagcggccctcgagcacgacaaggcctacgaccagcagctcaaagcgggtgacaatccgtacctgcggtataaccacgccgacgccgagtttcaggagcgtctgcaagaagatacgtcttttgggggcaacctcgggcgagcagtcttccaggccaagaagagggttctcgaaccttttggtctggttgaggaaggtgctaagacggctcctggaaagaaacgtccggtagagcagtcgccacaagagccagactcctcctcgggcattggcaagacaggccagcagcccgctaaaaagagactcaattttggtcagactggcgactcagagtcagtccccgacccacaacctctcggagaacctccagcaacccccgctgctgtgggacctactacaatggcttcaggcggtggcgcaccaatggcagacaataacgaaggcgccgacggagtgggtaatgcctcaggaaattggcattgcgattccacatggctgggcgacagagtcatcaccaccagcacccgaacatgggccttgcccacctataacaaccacctctacaagcaaatctccagtgcttcaacgggggccagcaacgacaaccactacttcggctacagcaccccctgggggtattttgatttcaacagattccactgccatttctcaccacgtgactggcagcgactcatcaacaacaattggggattccggcccaagagactcaacttcaagctcttcaacatccaagtcaaggaggtcacgacgaatgatggcgtcacgaccatcgctaataaccttaccagcacggttcaagtcttctcggactcggagtaccagttgccgtacgtcctcggctctgcgcaccagggctgcctccctccgttcccggcggacgtgttcatgattccgcagtacggctacctaacgctcaacaatggcagccaggcagtgggacggtcatccttttactgcctggaatatttcccatcgcagatgctgagaacgggcaataactttaccttcagctacaccttcgaggacgtgcctttccacagcagctacgcgcacagccagagcctggaccggctgatgaatcctctcatcgaccagtacctgtattacctgaacagaactcagaatcagtccggaagtgcccaaaacaaggacttgctgtttagccgggggtctccagctggcatgtctgttcagcccaaaaactggctacctggaccctgttaccggcagcagcgcgtttctaaaacaaaaacagacaacaacaacagcaactttacctggactggtgcttcaaaatataaccttaatgggcgtgaatctataatcaaccctggcactgctatggcctcacacaaagacgacaaagacaagttctttcccatgagcggtgtcatgatttttggaaaggagagcgccggagcttcaaacactgcattggacaatgtcatgatcacagacgaagaggaaatcaaagccactaaccccgtggccaccgaaagatttgggactgtggcagtcaatctccagagcagcagcacagaccctgcgaccggagatgtgcatgttatgggagccttacctggaatggtgtggcaagacagagacgtatacctgcagggtcctatttgggccaaaattcctcacacggatggacactttcacccgtctcctctcatgggcggctttggacttaagcacccgcctcctcagatcctcatcaaaaacacgcctgttcctgcgaatcctccggcagagttttcggctacaaagtttgcttcattcatcacccagtattccacaggacaagtgagcgtggagattgaatgggagctgcagaaagaaaacagcaaacgctggaatcccgaagtgcagtatacatctaactatgcaaaatctgccaacgttgatttcactgtggacaacaatggactttatactgagcctcgccccattggcacccgttacctcacccgtcccctg

SEQ ID NO: 5117 - protein, 736 aa, Adeno-associated virus 6; identical to SEQ ID NO: 4762

SEQ ID NO: 5118 - protein, 623 aa, Adeno-associated virus 6
MPGFYEIVIKVPSDLDEHLPGISDSFVNWVAEKEWELPPDSDMDLNLIEQAPLTVAEKLQRDFLVQWRRVSKAPEALFFVQFEKGESYFHLHILVETTGVKSMVLGRFLSQIRDKLVQTIYRGIEPTLPNWFAVTKTRNGAGGGNKVVDECYIPNYLLPKTQPELQWAWTNMEEYISACLNLAERKRLVAHDLTHVSQTQEQNKENLNPNSDAPVIRSKTSARYMELVGWLVDRGITSEKQWIQEDQASYISFNAASNSRSQIKAALDNAGKIMALTKSAPDYLVGPAPPADIKTNRIYRILELNGYDPAYAGSVFLGWAQKRFGKRNTIWLFGPATTGKTNIAEAIAHAVPFYGCVNWTNENFPFNDCVDKMVIWWEEGKMTAKVVESAKAILGGSKVRVDQKCKSSAQIDPTPVIVTSNTNMCAVIDGNSTTFEHQQPLQDRMFKFELTRRLEHDFGKVTKQEVKEFFRWAQDHVTEVAHEFYVRKGGANKRPAPDDADKSEPKRACPSVADPSTSDAEGAPVDFADRYQNKCSRHAGMLQMLFPCKTCERMNQNFNICFTHGTRDCSECFPGVSESQPVVRKRTYRKLCAIHHLLGRAPEIACSACDLVNVDLDDCVSEQ

SEQ ID NO: 5119 - DNA, 4683 bp, Adeno-associated virus 6
  source 1..4683: mol_type = genomic DNA
ttggccactccctctctgcgcgctcgctcgctcactgaggccgggcgaccaaaggtcgcccgacgcccgggctttgcccgggcggcctcagtgagcgagcgagcgcgcagagagggagtggccaactccatcactaggggttcctggaggggtggagtcgtgacgtgaattacgtcatagggttagggaggtcctgtattagaggtcacgtgagtgttttgcgacattttgcgacaccatgtggtcacgctgggtatttaagcccgagtgagcacgcagggtctccattttgaagcgggaggtttgaacgcgcagcgccatgccggggttttacgagattgtgattaaggtccccagcgaccttgacgagcatctgcccggcatttctgacagctttgtgaactgggtggccgagaaggaatgggagttgccgccagattctgacatggatctgaatctgattgagcaggcacccctgaccgtggccgagaagctgcagcgcgacttcctggtccagtggcgccgcgtgagtaaggccccggaggccctcttctttgttcagttcgagaagggcgagtcctacttccacctccatattctggtggagaccacgggggtcaaatccatggtgctgggccgcttcctgagtcagattagggacaagctggtgcagaccatctaccgcgggatcgagccgaccctgcccaactggttcgcggtgaccaagacgcgtaatggcgccggaggggggaacaaggtggtggacgagtgctacatccccaactacctcctgcccaagactcagcccgagctgcagtgggcgtggactaacatggaggagtatataagcgcgtgtttaaacctggccgagcgcaaacggctcgtggcgcacgacctgacccacgtcagccagacccaggagcagaacaaggagaatctgaaccccaattctgacgcgcctgtcatccggtcaaaaacctccgcacgctacatggagctggtcgggtggctggtggaccggggcatcacctccgagaagcagtggatccaggaggaccaggcctcgtacatctccttcaacgccgcctccaactcgcggtcccagatcaaggccgctctggacaatgccggcaagatcatggcgctgaccaaatccgcgcccgactacctggtaggccccgctccgcccgccgacattaaaaccaaccgcatttaccgcatcctggagctgaacggctacgaccctgcctacgccggctccgtctttctcggctgggcccagaaaaggttcggaaaacgcaacaccatctggctgtttgggccggccaccacgggcaagaccaacatcgcggaagccatcgcccacgccgtgcccttctacggctgcgtcaactggaccaatgagaactttcccttcaacgattgcgtcgacaagatggtgatctggtgggaggagggcaagatgacggccaaggtcgtggagtccgccaaggccattctcggcggcagcaaggtgcgcgtggaccaaaagtgcaagtcgtccgcccagatcgatcccacccccgtgatcgtcacctccaacaccaacatgtgcgccgtgattgacgggaacagcaccaccttcgagcaccagcagccgttgcaggaccggatgttcaaatttgaactcacccgccgtctggagcatgactttggcaaggtgacaaagcaggaagtcaaagagttcttccgctgggcgcaggatcacgtgaccgaggtggcgcatgagttctacgtcagaaagggtggagccaacaagagacccgcccccgatgacgcggataaaagcgagcccaagcgggcctgcccctcagtcgcggatccatcgacgtcagacgcggaaggagctccggtggactttgccgacaggtaccaaaacaaatgttctcgtcacgcgggcatgcttcagatgctgtttccctgcaaaacatgcgagagaatgaatcagaatttcaacatttgcttcacgcacgggaccagagactgttcagaatgtttccccggcgtgtcagaatctcaaccggtcgtcagaaagaggacgtatcggaaactctgtgccattcatcatctgctggggcgggctcccgagattgcttgctcggcctgcgatctggtcaacgtggatctggatgactgtgtttctgagcaataaatgacttaaaccaggtatggctgccgatggttatcttccagattggctcgaggacaacctctctgagggcattcgcgagtggtgggacttgaaacctggagccccgaaacccaaagccaaccagcaaaagcaggacgacggccggggtctggtgcttcctggctacaagtacctcggacccttcaacggactcgacaagggggagcccgtcaacgcggcggatgcagcggccctcgagcacgacaaggcctacgaccagcagctcaaagcgggtgacaatccgtacctgcggtataaccacgccgacgccgagtttcaggagcgtctgcaagaagatacgtcttttgggggcaacctcgggcgagcagtcttccaggccaagaagagggttctcgaaccttttggtctggttgaggaaggtgctaagacggctcctggaaagaaacgtccggtagagcagtcgccacaagagccagactcctcctcgggcattggcaagacaggccagcagcccgctaaaaagagactcaattttggtcagactggcgactcagagtcagtccccgacccacaacctctcggagaacctccagcaacccccgctgctgtgggacctactacaatggcttcaggcggtggcgcaccaatggcagacaataacgaaggcgccgacggagtgggtaatgcctcaggaaattggcattgcgattccacatggctgggcgacagagtcatcaccaccagcacccgaacatgggccttgcccacctataacaaccacctctacaagcaaatctccagtgcttcaacgggggccagcaacgacaaccactacttcggctacagcaccccctgggggtattttgatttcaacagattccactgccatttctcaccacgtgactggcagcgactcatcaacaacaattggggattccggcccaagagactcaacttcaagctcttcaacatccaagtcaaggaggtcacgacgaatgatggcgtcacgaccatcgctaataaccttaccagcacggttcaagtcttctcggactcggagtaccagttgccgtacgtcctcggctctgcgcaccagggctgcctccctccgttcccggcggacgtgttcatgattccgcagtacggctacctaacgctcaacaatggcagccaggcagtgggacggtcatccttttactgcctggaatatttcccatcgcagatgctgagaacgggcaataactttaccttcagctacaccttcgaggacgtgcctttccacagcagctacgcgcacagccagagcctggaccggctgatgaatcctctcatcgaccagtacctgtattacctgaacagaactcagaatcagtccggaagtgcccaaaacaaggacttgctgtttagccgggggtctccagctggcatgtctgttcagcccaaaaactggctacctggaccctgttaccggcagcagcgcgtttctaaaacaaaaacagacaacaacaacagcaactttacctggactggtgcttcaaaatataaccttaatgggcgtgaatctataatcaaccctggcactgctatggcctcacacaaagacgacaaagacaagttctttcccatgagcggtgtcatgatttttggaaaggagagcgccggagcttcaaacactgcattggacaatgtcatgatcacagacgaagaggaaatcaaagccactaaccccgtggccaccgaaagatttgggactgtggcagtcaatctccagagcagcagcacagaccctgcgaccggagatgtgcatgttatgggagccttacctggaatggtgtggcaagacagagacgtatacctgcagggtcctatttgggccaaaattcctcacacggatggacactttcacccgtctcctctcatgggcggctttggacttaagcacccgcctcctcagatcctcatcaaaaacacgcctgttcctgcgaatcctccggcagagttttcggctacaaagtttgcttcattcatcacccagtattccacaggacaagtgagcgtggagattgaatgggagctgcagaaagaaaacagcaaacgctggaatcccgaagtgcagtatacatctaactatgcaaaatctgccaacgttgatttcactgtggacaacaatggactttatactgagcctcgccccattggcacccgttacctcacccgtcccctgtaattgtgtgttaatcaataaaccggttaattcgtgtcagttgaactttggtctcatgtcgttattatcttatctggtcaccatagcaaccggttacacattaactgcttagttgcgcttcgcgaatacccctagtgatggagttgcccactccctctatgcgcgctcgctcgctcggtggggccggcagagcagagctctgccgtctgcggacctttggtccgcaggccccaccgagcgagcgagcgcgcatagagggagtgggcaa

SEQ ID NO: 5120 - DNA, 2211 bp, Adeno-associated virus 6
  source 1..2211: mol_type = genomic DNA
atggctgccgatggttatcttccagattggctcgaggacaacctctctgagggcattcgcgagtggtgggacttgaaacctggagccccgaaacccaaagccaaccagcaaaagcaggacgacggccggggtctggtgcttcctggctacaagtacctcggacccttcaacggactcgacaagggggagcccgtcaacgcggcggatgcagcggccctcgagcacgacaaggcctacgaccagcagctcaaagcgggtgacaatccgtacctgcggtataaccacgccgacgccgagtttcaggagcgtctgcaagaagatacgtcttttgggggcaacctcgggcgagcagtcttccaggccaagaagagggttctcgaaccttttggtctggttgaggaaggtgctaagacggctcctggaaagaaacgtccggtagagcagtcgccacaagagccagactcctcctcgggcattggcaagacaggccagcagcccgctaaaaagagactcaattttggtcagactggcgactcagagtcagtccccgacccacaacctctcggagaacctccagcaacccccgctgctgtgggacctactacaatggcttcaggcggtggcgcaccaatggcagacaataacgaaggcgccgacggagtgggtaatgcctcaggaaattggcattgcgattccacatggctgggcgacagagtcatcaccaccagcacccgaacatgggccttgcccacctataacaaccacctctacaagcaaatctccagtgcttcaacgggggccagcaacgacaaccactacttcggctacagcaccccctgggggtattttgatttcaacagattccactgccatttctcaccacgtgactggcagcgactcatcaacaacaattggggattccggcccaagagactcaacttcaagctcttcaacatccaagtcaaggaggtcacgacgaatgatggcgtcacgaccatcgctaataaccttaccagcacggttcaagtcttctcggactcggagtaccagttgccgtacgtcctcggctctgcgcaccagggctgcctccctccgttcccggcggacgtgttcatgattccgcagtacggctacctaacgctcaacaatggcagccaggcagtgggacggtcatccttttactgcctggaatatttcccatcgcagatgctgagaacgggcaataactttaccttcagctacaccttcgaggacgtgcctttccacagcagctacgcgcacagccagagcctggaccggctgatgaatcctctcatcgaccagtacctgtattacctgaacagaactcagaatcagtccggaagtgcccaaaacaaggacttgctgtttagccgggggtctccagctggcatgtctgttcagcccaaaaactggctacctggaccctgttaccggcagcagcgcgtttctaaaacaaaaacagacaacaacaacagcaactttacctggactggtgcttcaaaatataaccttaatgggcgtgaatctataatcaaccctggcactgctatggcctcacacaaagacgacaaagacaagttctttcccatgagcggtgtcatgatttttggaaaggagagcgccggagcttcaaacactgcattggacaatgtcatgatcacagacgaagaggaaatcaaagccactaaccccgtggccaccgaaagatttgggactgtggcagtcaatctccagagcagcagcacagaccctgcgaccggagatgtgcatgttatgggagccttacctggaatggtgtggcaagacagagacgtatacctgcagggtcctatttgggccaaaattcctcacacggatggacactttcacccgtctcctctcatgggcggctttggacttaagcacccgcctcctcagatcctcatcaaaaacacgcctgttcctgcgaatcctccggcagagttttcggctacaaagtttgcttcattcatcacccagtattccacaggacaagtgagcgtggagattgaatgggagctgcagaaagaaaacagcaaacgctggaatcccgaagtgcagtatacatctaactatgcaaaatctgccaacgttgatttcactgtggacaacaatggactttatactgagcctcgccccattggcacccgttacctcacccgtcccctgtaa

SEQ ID NO: 5121 - DNA, 2214 bp, Adeno-associated virus 7
  source 1..2214: mol_type = genomic DNA
atggctgccgatggttatcttccagattggctcgaggacaacctctctgagggcattcgcgagtggtgggacctgaaacctggagccccgaaacccaaagccaaccagcaaaagcaggacaacggccggggtctggtgcttcctggctacaagtacctcggacccttcaacggactcgacaagggggagcccgtcaacgcggcggacgcagcggccctcgagcacgacaaggcctacgaccagcagctcaaagcgggtgacaatccgtacctgcggtataaccacgccgacgccgagtttcaggagcgtctgcaagaagatacgtcatttgggggcaacctcgggcgagcagtcttccaggccaagaagcgggttctcgaacctctcggtctggttgaggaaggcgctaagacggctcctgcaaagaagagaccggtagagccgtcacctcagcgttcccccgactcctccacgggcatcggcaagaaaggccagcagcccgccagaaagagactcaatttcggtcagactggcgactcagagtcagtccccgaccctcaacctctcggagaacctccagcagcgccctctagtgtgggatctggtacagtggctgcaggcggtggcgcaccaatggcagacaataacgaaggtgccgacggagtgggtaatgcctcaggaaattggcattgcgattccacatggctgggcgacagagtcattaccaccagcacccgaacctgggccctgcccacctacaacaaccacctctacaagcaaatctccagtgaaactgcaggtagtaccaacgacaacacctacttcggctacagcaccccctgggggtattttgactttaacagattccactgccacttctcaccacgtgactggcagcgactcatcaacaacaactggggattccggcccaagaagctgcggttcaagctcttcaacatccaggtcaaggaggtcacgacgaatgacggcgttacgaccatcgctaataaccttaccagcacgattcaggtattctcggactcggaataccagctgccgtacgtcctcggctctgcgcaccagggctgcctgcctccgttcccggcggacgtcttcatgattcctcagtacggctacctgactctcaacaatggcagtcagtctgtgggacgttcctccttctactgcctggagtacttcccctctcagatgctgagaacgggcaacaactttgagttcagctacagcttcgaggacgtgcctttccacagcagctacgcacacagccagagcctggaccggctgatgaatcccctcatcgaccagtacttgtactacctggccagaacacagagtaacccaggaggcacagctggcaatcgggaactgcagttttaccagggcgggccttcaactatggccgaacaagccaagaattggttacctggaccttgcttccggcaacaaagagtctccaaaacgctggatcaaaacaacaacagcaactttgcttggactggtgccaccaaatatcacctgaacggcagaaactcgttggttaatcccggcgtcgccatggcaactcacaaggacgacgaggaccgctttttcccatccagcggagtcctgatttttggaaaaactggagcaactaacaaaactacattggaaaatgtgttaatgacaaatgaagaagaaattcgtcctactaatcctgtagccacggaagaatacgggatagtcagcagcaacttacaagcggctaatactgcagcccagacacaagttgtcaacaaccagggagccttacctggcatggtctggcagaaccgggacgtgtacctgcagggtcccatctgggccaagattcctcacacggatggcaactttcacccgtctcctttgatgggcggctttggacttaaacatccgcctcctcagatcctgatcaagaacactcccgttcccgctaatcctccggaggtgtttactcctgccaagtttgcttcgttcatcacacagtacagcaccggacaagtcagcgtggaaatcgagtgggagctgcagaaggaaaacagcaagcgctggaacccggagattcagtacacctccaactttgaaaagcagactggtgtggactttgccgttgacagccagggtgtttactctgagcctcgccctattggcactcgttacctcacccgtaatctgtaa

SEQ ID NO: 5122 - protein, 738 aa, Adeno-associated virus 7
MAADGYLPDWLEDNLSEGIREWWALKPGAPKPKANQQKQDDGRGLVLPGYKYLGPFNGLDKGEPVNAADAAALEHDKAYDQQLQAGDNPYLRYNHADAEFQERLQEDTSFGGNLGRAVFQAKKRVLEPLGLVEEGAKTAPGKKRPVEPSPQRSPDSSTGIGKKGQQPARKRLNFGQTGDSESVPDPQPLGEPPAAPSGVGPNTMAAGGGAPMADNNEGADGVGSSSGNWHCDSTWLGDRVITTSTRTWALPTYNNHLYKQISNGTSGGATNDNTYFGYSTPWGYFDFNRFHCHFSPRDWQRLINNNWGFRPKRLSFKLFNIQVKEVTQNEGTKTIANNLTSTIQVFTDSEYQLPYVLGSAHQGCLPPFPADVFMIPQYGYLTLNNGSQAVGRSSFYCLEYFPSQMLRTGNNFQFTYTFEDVPFHSSYAHSQSLDRLMNPLIDQYLYYLSRTQTTGGTANTQTLGFSQGGPNTMANQAKNWLPGPCYRQQRVSTTTGQNNNSNFAWTAGTKYHLNGRNSLANPGIAMATHKDDEERFFPSNGILIFGKQNAARDNADYSDVMLTSEEEIKTTNPVATEEYGIVADNLQQQNTAPQIGTVNSQGALPGMVWQNRDVYLQGPIWAKIPHTDGNFHPSPLMGGFGLKHPPPQILIKNTPVPADPPTTFNQSKLNSFITQYSTGQVSVEIEWELQKENSKRWNPEIQYTSNYYKSTSVDFAVNTEGVYSEPRPIGTRYLTRNL

SEQ ID NO: 5123 - protein, 737 aa, Adeno-associated virus 7
MAADGYLPDWLEDNLSEGIREWWDLKPGAPKPKANQQKQDNGRGLVLPGYKYLGPFNGLDKGEPVNAADAAALEHDKAYDQQLKAGDNPYLRYNHADAEFQERLQEDTSFGGNLGRAVFQAKKRVLEPLGLVEEGAKTAPAKKRPVEPSPQRSPDSSTGIGKKGQQPARKRLNFGQTGDSESVPDPQPLGEPPAAPSSVGSGTVAAGGGAPMADNNEGADGVGNASGNWHCDSTWLGDRVITTSTRTWALPTYNNHLYKQISSETAGSTNDNTYFGYSTPWGYFDFNRFHCHFSPRDWQRLINNNWGFRPKKLRFKLFNIQVKEVTTNDGVTTIANNLTSTIQVFSDSEYQLPYVLGSAHQGCLPPFPADVFMIPQYGYLTLNNGSQSVGRSSFYCLEYFPSQMLRTGNNFEFSYSFEDVPFHSSYAHSQSLDRLMNPLIDQYLYYLARTQSNPGGTAGNRELQFYQGGPSTMAEQAKNWLPGPCFRQQRVSKTLDQNNNSNFAWTGATKYHLNGRNSLVNPGVAMATHKDDEDRFFPSSGVLIFGKTGATNKTTLENVLMTNEEEIRPTNPVATEEYGIVSSNLQAANTAAQTQVVNNQGALPGMVWQNRDVYLQGPIWAKIPHTDGNFHPSPLMGGFGLKHPPPQILIKNTPVPANPPEVFTPAKFASFITQYSTGQVSVEIEWELQKENSKRWNPEIQYTSNFEKQTGVDFAVDSQGVYSEPRPIGTRYLTRNL

SEQ ID NO: 5124 - protein, 623 aa, Adeno-associated virus 7
MPGFYEIVIKVPSDLDEHLPGISDSFVNWVAEKEWELPPDSDMDLNLIEQAPLTVAEKLQRDFLVQWRRVSKAPEALFFVQFEKGESYFHLHVLVETTGVKSMVLGRFLSQIREKLVQTIYRGVEPTLPNWFAVTKTRNGAGGGNKVVDECYIPNYLLPKTQPELQWAWTNMEEYISACLNLAERKRLVAQHLTHVSQTQEQNKENLNPNSDAPVIRSKTSARYMELVGWLVDRGITSEKQWIQEDQASYISFNAASNSRSQIKAALDNAGKIMALTKSAPDYLVGPSLPADIKTNRIYRILELNGYDPAYAGSVFLGWAQKKFGKRNTIWLFGPATTGKTNIAEAIAHAVPFYGCVNWTNENFPFNDCVDKMVIWWEEGKMTAKVVESAKAILGGSKVRVDQKCKSSAQIDPTPVIVTSNTNMCAVIDGNSTTFEHQQPLQDRMFKFELTRRLEHDFGKVTKQEVKEFFRWASDHVTEVAHEFYVRKGGASKRPAPDDADISEPKRACPSVADPSTSDAEGAPVDFADRYQNKCSRHAGMIQMLFPCKTCERMNQNFNICFTHGVRDCLECFPGVSESQPVVRKKTYRKLCAIHHLLGRAPEIACSACDLVNVDLDDCVSEQ

SEQ ID NO: 5125 - DNA, 4721 bp, Adeno-associated virus 7
  source 1..4721: mol_type = genomic DNA
ttggccactccctctatgcgcgctcgctcgctcggtggggcctgcggaccaaaggtccgcagacggcagagctctgctctgccggccccaccgagcgagcgagcgcgcatagagggagtggccaactccatcactaggggtaccgcgaagcgcctcccacgctgccgcgtcagcgctgacgtaaatcacgtcataggggagtggtcctgtattagctgtcacgtgagtgcttttgcgacattttgcgacaccacgtggccatttgaggtatatatggccgagtgagcgagcaggatctccattttgaccgcgaaatttgaacgagcagcagccatgccgggtttctacgagatcgtgatcaaggtgccgagcgacctggacgagcacctgccgggcatttctgactcgtttgtgaactgggtggccgagaaggaatgggagctgcccccggattctgacatggatctgaatctgatcgagcaggcacccctgaccgtggccgagaagctgcagcgcgacttcctggtccaatggcgccgcgtgagtaaggccccggaggccctgttctttgttcagttcgagaagggcgagagctacttccaccttcacgttctggtggagaccacgggggtcaagtccatggtgctaggccgcttcctgagtcagattcgggagaagctggtccagaccatctaccgcggggtcgagcccacgctgcccaactggttcgcggtgaccaagacgcgtaatggcgccggcggggggaacaaggtggtggacgagtgctacatccccaactacctcctgcccaagacccagcccgagctgcagtgggcgtggactaacatggaggagtatataagcgcgtgtttgaacctggccgaacgcaaacggctcgtggcgcagcacctgacccacgtcagccagacgcaggagcagaacaaggagaatctgaaccccaattctgacgcgcccgtgatcaggtcaaaaacctccgcgcgctacatggagctggtcgggtggctggtggaccggggcatcacctccgagaagcagtggatccaggaggaccaggcctcgtacatctccttcaacgccgcctccaactcgcggtcccagatcaaggccgcgctggacaatgccggcaagatcatggcgctgaccaaatccgcgcccgactacctggtggggccctcgctgcccgcggacattaaaaccaaccgcatctaccgcatcctggagctgaacgggtacgatcctgcctacgccggctccgtctttctcggctgggcccagaaaaagttcgggaagcgcaacaccatctggctgtttgggcccgccaccaccggcaagaccaacattgcggaagccatcgcccacgccgtgcccttctacggctgcgtcaactggaccaatgagaactttcccttcaacgattgcgtcgacaagatggtgatctggtgggaggagggcaagatgacggccaaggtcgtggagtccgccaaggccattctcggcggcagcaaggtgcgcgtggaccaaaagtgcaagtcgtccgcccagatcgaccccacccccgtgatcgtcacctccaacaccaacatgtgcgccgtgattgacgggaacagcaccaccttcgagcaccagcagccgttgcaggaccggatgttcaaatttgaactcacccgccgtctggagcacgactttggcaaggtgacgaagcaggaagtcaaagagttcttccgctgggccagtgatcacgtgaccgaggtggcgcatgagttctacgtcagaaagggcggagccagcaaaagacccgcccccgatgacgcggatataagcgagcccaagcgggcctgcccctcagtcgcggatccatcgacgtcagacgcggaaggagctccggtggactttgccgacaggtaccaaaacaaatgttctcgtcacgcgggcatgattcagatgctgtttccctgcaaaacgtgcgagagaatgaatcagaatttcaacatttgcttcacacacggggtcagagactgtttagagtgtttccccggcgtgtcagaatctcaaccggtcgtcagaaaaaagacgtatcggaaactctgcgcgattcatcatctgctggggcgggcgcccgagattgcttgctcggcctgcgacctggtcaacgtggacctggacgactgcgtttctgagcaataaatgacttaaaccaggtatggctgccgatggttatcttccagattggctcgaggacaacctctctgagggcattcgcgagtggtgggacctgaaacctggagccccgaaacccaaagccaaccagcaaaagcaggacaacggccggggtctggtgcttcctggctacaagtacctcggacccttcaacggactcgacaagggggagcccgtcaacgcggcggacgcagcggccctcgagcacgacaaggcctacgaccagcagctcaaagcgggtgacaatccgtacctgcggtataaccacgccgacgccgagtttcaggagcgtctgcaagaagatacgtcatttgggggcaacctcgggcgagcagtcttccaggccaagaagcgggttctcgaacctctcggtctggttgaggaaggcgctaagacggctcctgcaaagaagagaccggtagagccgtcacctcagcgttcccccgactcctccacgggcatcggcaagaaaggccagcagcccgccagaaagagactcaatttcggtcagactggcgactcagagtcagtccccgaccctcaacctctcggagaacctccagcagcgccctctagtgtgggatctggtacagtggctgcaggcggtggcgcaccaatggcagacaataacgaaggtgccgacggagtgggtaatgcctcaggaaattggcattgcgattccacatggctgggcgacagagtcattaccaccagcacccgaacctgggccctgcccacctacaacaaccacctctacaagcaaatctccagtgaaactgcaggtagtaccaacgacaacacctacttcggctacagcaccccctgggggtattttgactttaacagattccactgccacttctcaccacgtgactggcagcgactcatcaacaacaactggggattccggcccaagaagctgcggttcaagctcttcaacatccaggtcaaggaggtcacgacgaatgacggcgttacgaccatcgctaataaccttaccagcacgattcaggtattctcggactcggaataccagctgccgtacgtcctcggctctgcgcaccagggctgcctgcctccgttcccggcggacgtcttcatgattcctcagtacggctacctgactctcaacaatggcagtcagtctgtgggacgttcctccttctactgcctggagtacttcccctctcagatgctgagaacgggcaacaactttgagttcagctacagcttcgaggacgtgcctttccacagcagctacgcacacagccagagcctggaccggctgatgaatcccctcatcgaccagtacttgtactacctggccagaacacagagtaacccaggaggcacagctggcaatcgggaactgcagttttaccagggcgggccttcaactatggccgaacaagccaagaattggttacctggaccttgcttccggcaacaaagagtctccaaaacgctggatcaaaacaacaacagcaactttgcttggactggtgccaccaaatatcacctgaacggcagaaactcgttggttaatcccggcgtcgccatggcaactcacaaggacgacgaggaccgctttttcccatccagcggagtcctgatttttggaaaaactggagcaactaacaaaactacattggaaaatgtgttaatgacaaatgaagaagaaattcgtcctactaatcctgtagccacggaagaatacgggatagtcagcagcaacttacaagcggctaatactgcagcccagacacaagttgtcaacaaccagggagccttacctggcatggtctggcagaaccgggacgtgtacctgcagggtcccatctgggccaagattcctcacacggatggcaactttcacccgtctcctttgatgggcggctttggacttaaacatccgcctcctcagatcctgatcaagaacactcccgttcccgctaatcctccggaggtgtttactcctgccaagtttgcttcgttcatcacacagtacagcaccggacaagtcagcgtggaaatcgagtgggagctgcagaaggaaaacagcaagcgctggaacccggagattcagtacacctccaactttgaaaagcagactggtgtggactttgccgttgacagccagggtgtttactctgagcctcgccctattggcactcgttacctcacccgtaatctgtaattgcatgttaatcaataaaccggttgattcgtttcagttgaactttggtctcctgtgcttcttatcttatcggtttccatagcaactggttacacattaactgcttgggtgcgcttcacgataagaacactgacgtcaccgcggtacccctagtgatggagttggccactccctctatgcgcgctcgctcgctcggtggggcctgcggaccaaaggtccgcagacggcagagctctgctctgccggccccaccgagcgagcgagcgcgcatagagggagtggccaa

SEQ ID NO: 5126 - DNA, 2214 bp, Adeno-associated virus 7; identical to SEQ ID NO: 5121
  source 1..2214: mol_type = genomic DNA

SEQ ID NO: 5127 - protein, 737 aa, Adeno-associated virus 7; identical to SEQ ID NO: 5123

SEQ ID NO: 5128 - DNA, 2217 bp, Adeno-associated virus 8
  source 1..2217: mol_type = genomic DNA
atggctgccgatggttatcttccagattggctcgaggacaacctctctgagggcattcgcgagtggtgggcgctgaaacctggagccccgaagcccaaagccaaccagcaaaagcaggacgacggccggggtctggtgcttcctggctacaagtacctcggacccttcaacggactcgacaagggggagcccgtcaacgcggcggacgcagcggccctcgagcacgacaaggcctacgaccagcagctgcaggcgggtgacaatccgtacctgcggtataaccacgccgacgccgagtttcaggagcgtctgcaagaagatacgtcttttgggggcaacctcgggcgagcagtcttccaggccaagaagcgggttctcgaacctctcggtctggttgaggaaggcgctaagacggctcctggaaagaagagaccggtagagccatcaccccagcgttctccagactcctctacgggcatcggcaagaaaggccaacagcccgccagaaaaagactcaattttggtcagactggcgactcagagtcagttccagaccctcaacctctcggagaacctccagcagcgccctctggtgtgggacctaatacaatggctgcaggcggtggcgcaccaatggcagacaataacgaaggcgccgacggagtgggtagttcctcgggaaattggcattgcgattccacatggctgggcgacagagtcatcaccaccagcacccgaacctgggccctgcccacctacaacaaccacctctacaagcaaatctccaacgggacatcgggaggagccaccaacgacaacacctacttcggctacagcaccccctgggggtattttgactttaacagattccactgccacttttcaccacgtgactggcagcgactcatcaacaacaactggggattccggcccaagagactcagcttcaagctcttcaacatccaggtcaaggaggtcacgcagaatgaaggcaccaagaccatcgccaataacctcaccagcaccatccaggtgtttacggactcggagtaccagctgccgtacgttctcggctctgcccaccagggctgcctgcctccgttcccggcggacgtgttcatgattccccagtacggctacctaacactcaacaacggtagtcaggccgtgggacgctcctccttctactgcctggaatactttccttcgcagatgctgagaaccggcaacaacttccagtttacttacaccttcgaggacgtgcctttccacagcagctacgcccacagccagagcttggaccggctgatgaatcctctgattgaccagtacctgtactacttgtctcggactcaaacaacaggaggcacggcaaatacgcagactctgggcttcagccaaggtgggcctaatacaatggccaatcaggcaaagaactggctgccaggaccctgttaccgccaacaacgcgtctcaacgacaaccgggcaaaacaacaatagcaactttgcctggactgctgggaccaaataccatctgaatggaagaaattcattggctaatcctggcatcgctatggcaacacacaaagacgacgaggagcgtttttttcccagtaacgggatcctgatttttggcaaacaaaatgctgccagagacaatgcggattacagcgatgtcatgctcaccagcgaggaagaaatcaaaaccactaaccctgtggctacagaggaatacggtatcgtggcagataacttgcagcagcaaaacacggctcctcaaattggaactgtcaacagccagggggccttacccggtatggtctggcagaaccgggacgtgtacctgcagggtcccatctgggccaagattcctcacacggacggcaacttccacccgtctccgctgatgggcggctttggcctgaaacatcctccgcctcagatcctgatcaagaacacgcctgtacctgcggatcctccgaccaccttcaaccagtcaaagctgaactctttcatcacgcaatacagcaccggacaggtcagcgtggaaattgaatgggagctgcagaaggaaaacagcaagcgctggaaccccgagatccagtacacctccaactactacaaatctacaagtgtggactttgctgttaatacagaaggcgtgtactctgaaccccgccccattggcacccgttacctcacccgtaatctgtaa

SEQ ID NO: 5129 - DNA, 2213 bp, Adeno-associated virus 8
  source 1..2213: mol_type = genomic DNA
atggctgccgatggttatcttccagattggctcgaggacaacctctctgagggcattcgcgagtggtgggcgctgaaacctggagccccgaagcccaaagccaaccagcaaaagcaggacgacggccggggtctggtgcttcctggctacaagtacctcggacccttcaacggactcgacaagggggagcccgtcaacgcggcggacgcagcggccctcgagcacgacaaggcctacgaccagcagctgcaggcgggtgacaatccgtacctgcggtataaccacgccgacgccgagtttcaggagcgtctgcaagaagatacgtcttttgggggcaacctcgggcgagcagtcttccaggccaagaagcgggttctcgaacctctcggtctggttgaggaaggcgctaagacggctcctggaaagaagagaccggtagagccatcaccccagcgttctccagactcctctacgggcatcggcaagaaaggccaacagcccgccagaaaaagactcaattttggtcagactggcgactcagagtcagttccagaccctcaacctctcggagaacctccagcagcgccctctggtgtgggacctaatacaatggctgcaggcggtggcgcaccaatggcagacaataacgaaggcgccgacggagtgggtagttcctcgggaaattggcattgcgattccacatggctgggcgacagagtcatcaccaccagcacccgaacctgggccctgcccacctacaacaaccacctctacaagcaaatctccaacgggacatcgggaggagccaccaacgacaacacctacttcggctacagcaccccctgggggtattttgactttaacagattccactgccacttttcaccacgtgactggcagcgactcatcaacaacaactggggattccggcccaagagactcagcttcaagctcttcaacatccaggtcaaggaggtcacgcagaatgaaggcaccaagaccatcgccaataacctcaccagcaccatccaggtgtttacggactcggagtaccagctgccgtacgttctcggctctgcccaccagggctgcctgcctccgttcccggcggacgtgttcatgattccccagtacggctacctaacactcaacaacggtagtcaggccgtgggacgctcctccttctactgcctggaatactttccttcgcagatgctgagaaccggcaacaacttccagtttacttacaccttcgaggacgtgcctttccacagcagctacgcccacagccagagcttggaccggctgatgaatcctctgattgaccagtacctgtactacttgtctcggactcaaacaacaggaggcacggcaaatacgcagactctgggcttcagccaaggtgggcctaatacaatggccaatcaggcaaagaactggctgccaggaccctgttaccgccaacaacgcgtctcaacgacaaccgggcaaaacaacaatagcaactttgcctggactgctgggaccaaataccatctgaatggaagaaattcattggctaatcctggcatcgctatggcaacacacaaagacgacgaggagcgtttttttcccagtaacgggatcctgatttttggcaaacaaaatgctgccagagacaatgcggattacagcgatgtcatgctcaccagcgaggaagaaatcaaaaccactaaccctgtggctacagaggaatacggtatcgtggcagataacttgcagcagcaaaacacggctcctcaaattggaactgtcaacagccagggggccttacccggtatggtctggcagaaccgggacgtgtacctgcagggtcccatctgggccaagattcctcacacggacggcaacttccacccgtctccgctgatgggcggctttggcctgaaacatcctccgcctcagatcctgatcaagaacacgcctgtacctgcggatcctccgaccaccttcaaccagtcaaagctgaactctttcatcacgcaatacagcaccggacaggtcagcgtggaaattgaatgggagctgcagaaggaaaacagcaagcgctggaaccccgagatccagtacacctccaactactacaaatctacaagtgtggactttgctgtaatacagaaggcgtgtactctgaaccccgccccattggcacccgttacctcacccgtaatctg

SEQ ID NO: 5130 - DNA, 4393 bp, Adeno-associated virus 8
  source 1..4393: mol_type = genomic DNA
cagagagggagtggccaactccatcactaggggtagcgcgaagcgcctcccacgctgccgcgtcagcgctgacgtaaattacgtcataggggagtggtcctgtattagctgtcacgtgagtgcttttgcggcattttgcgacaccacgtggccatttgaggtatatatggccgagtgagcgagcaggatctccattttgaccgcgaaatttgaacgagcagcagccatgccgggcttctacgagatcgtgatcaaggtgccgagcgacctggacgagcacctgccgggcatttctgactcgtttgtgaactgggtggccgagaaggaatgggagctgcccccggattctgacatggatcggaatctgatcgagcaggcacccctgaccgtggccgagaagctgcagcgcgacttcctggtccaatggcgccgcgtgagtaaggccccggaggccctcttctttgttcagttcgagaagggcgagagctactttcacctgcacgttctggtcgagaccacgggggtcaagtccatggtgctaggccgcttcctgagtcagattcgggaaaagcttggtccagaccatctacccgcggggtcgagccccaccttgcccaactggttcgcggtgaccaaagacgcggtaatggcgccggcgggggggaacaaggtggtggacgagtgctacatccccaactacctcctgcccaagactcagcccgagctgcagtgggcgtggactaacatggaggagtatataagcgcgtgcttgaacctggccgagcgcaaacggctcgtggcgcagcacctgacccacgtcagccagacgcaggagcagaacaaggagaatctgaaccccaattctgacgcgcccgtgatcaggtcaaaaacctccgcgcgctatatggagctggtcgggtggctggtggaccggggcatcacctccgagaagcagtggatccaggaggaccaggcctcgtacatctccttcaacgccgcctccaactcgcggtcccagatcaaggccgcgctggacaatgccggcaagatcatggcgctgaccaaatccgcgcccgactacctggtggggccctcgctgcccgcggacattacccagaaccgcatctaccgcatcctcgctctcaacggctacgaccctgcctacgccggctccgtctttctcggctgggctcagaaaaagttcgggaaacgcaacaccatctggctgtttggacccgccaccaccggcaagaccaacattgcggaagccatcgcccacgccgtgcccttctacggctgcgtcaactggaccaatgagaactttcccttcaatgattgcgtcgacaagatggtgatctggtgggaggagggcaagatgacggccaaggtcgtggagtccgccaaggccattctcggcggcagcaaggtgcgcgtggaccaaaagtgcaagtcgtccgcccagatcgaccccacccccgtgatcgtcacctccaacaccaacatgtgcgccgtgattgacgggaacagcaccaccttcgagcaccagcagcctctccaggaccggatgtttaagttcgaactcacccgccgtctggagcacgactttggcaaggtgacaaagcaggaagtcaaagagttcttccgctgggccagtgatcacgtgaccgaggtggcgcatgagttttacgtcagaaagggcggagccagcaaaagacccgcccccgatgacgcggataaaagcgagcccaagcgggcctgcccctcagtcgcggatccatcgacgtcagacgcggaaggagctccggtggactttgccgacaggtaccaaaacaaatgttctcgtcacgcgggcatgcttcagatgctgtttccctgcaaaacgtgcgagagaatgaatcagaatttcaacatttgcttcacacacggggtcagagactgctcagagtgtttccccggcgtgtcagaatctcaaccggtcgtcagaaagaggacgtatcggaaactctgtgcgattcatcatctgctggggcgggctcccgagattgcttgctcggcctgcgatctggtcaacgtggacctggatgactgtgtttctgagcaataaatgacttaaaccaggtatggctgccgatggttatcttccagattggctcgaggacaacctctctgagggcattcgcgagtggtgggcgctgaaacctggagccccgaagcccaaagccaaccagcaaaagcaggacgacggccggggtctggtgcttcctggctacaagtacctcggacccttcaacggactcgacaagggggagcccgtcaacgcggcggacgcagcggccctcgagcacgacaaggcctacgaccagcagctgcaggcgggtgacaatccgtacctgcggtataaccacgccgacgccgagtttcaggagcgtctgcaagaagatacgtcttttgggggcaacctcgggcgagcagtcttccaggccaagaagcgggttctcgaacctctcggtctggttgaggaaggcgctaagacggctcctggaaagaagagaccggtagagccatcaccccagcgttctccagactcctctacgggcatcggcaagaaaggccaacagcccgccagaaaaagactcaattttggtcagactggcgactcagagtcagttccagaccctcaacctctcggagaacctccagcagcgccctctggtgtgggacctaatacaatggctgcaggcggtggcgcaccaatggcagacaataacgaaggcgccgacggagtgggtagttcctcgggaaattggcattgcgattccacatggctgggcgacagagtcatcaccaccagcacccgaacctgggccctgcccacctacaacaaccacctctacaagcaaatctccaacgggacatcgggaggagccaccaacgacaacacctacttcggctacagcaccccctgggggtattttgactttaacagattccactgccacttttcaccacgtgactggcagcgactcatcaacaacaactggggattccggcccaagagactcagcttcaagctcttcaacatccaggtcaaggaggtcacgcagaatgaaggcaccaagaccatcgccaataacctcaccagcaccatccaggtgtttacggactcggagtaccagctgccgtacgttctcggctctgcccaccagggctgcctgcctccgttcccggcggacgtgttcatgattccccagtacggctacctaacactcaacaacggtagtcaggccgtgggacgctcctccttctactgcctggaatactttccttcgcagatgctgagaaccggcaacaacttccagtttacttacaccttcgaggacgtgcctttccacagcagctacgcccacagccagagcttggaccggctgatgaatcctctgattgaccagtacctgtactacttgtctcggactcaaacaacaggaggcacggcaaatacgcagactctgggcttcagccaaggtgggcctaatacaatggccaatcaggcaaagaactggctgccaggaccctgttaccgccaacaacgcgtctcaacgacaaccgggcaaaacaacaatagcaactttgcctggactgctgggaccaaataccatctgaatggaagaaattcattggctaatcctggcatcgctatggcaacacacaaagacgacgaggagcgtttttttcccagtaacgggatcctgatttttggcaaacaaaatgctgccagagacaatgcggattacagcgatgtcatgctcaccagcgaggaagaaatcaaaaccactaaccctgtggctacagaggaatacggtatcgtggcagataacttgcagcagcaaaacacggctcctcaaattggaactgtcaacagccagggggccttacccggtatggtctggcagaaccgggacgtgtacctgcagggtcccatctgggccaagattcctcacacggacggcaacttccacccgtctccgctgatgggcggctttggcctgaaacatcctccgcctcagatcctgatcaagaacacgcctgtacctgcggatcctccgaccaccttcaaccagtcaaagctgaactctttcatcacgcaatacagcaccggacaggtcagcgtggaaattgaatgggagctgcagaaggaaaacagcaagcgctggaaccccgagatccagtacacctccaactactacaaatctacaagtgtggactttgctgttaatacagaaggcgtgtactctgaaccccgccccattggcacccgttacctcacccgtaatctgtaattgcctgttaatcaataaaccggttgattcgtttcagttgaactttggtctctgcg

SEQ ID NO: 5131 - protein, 738 aa, Adeno-associated virus 8; identical to SEQ ID NO: 5122

SEQ ID NO: 5132 - protein, 737 aa, Adeno-associated virus 8
MAADGYLPDWLEDNLSEGIREWWALKPGAPKPKANQQKQDDGRGLVLPGYKYLGPFNGLDKGEPVNAADAAALEHDKAYDQQLQAGDNPYLRYNHADAEFQERLQEDTSFGGNLGRAVFQAKKRVLEPLGLVEEGAKTAPGKKRPVEPSPQRSPDSSTGIGKKGQQPARKRLNFGQTGDSESVPDPQPLGEPPAAPSGVGPNTMAAGGGAPMADNNEGADGVGSSSGNWHCDSTWLGDRVITTSTRTWALPTYNNHLYKQISNGTSGGATNDNTYFGYSTPWGYFDFNRFHCHFSPRDWQRLINNNWGFRPKRLSFKLFNIQVKEVTQNEGTKTIANNLTSTIQVFTDSEYQLPYVLGSAHQGCLPPFPADVFMIPQYGYLTLNNGSQAVGRSSFYCLEYFPSQMLRTGNNFQFTYTFEDVPFHSSYAHSQSLDRLMNPLIDQYLYYLSRTQTTGGTANTQTLGFSQGGPNTMANQAKNWLPGPCYRQQRVSTTTGQNNNSNFAWTAGTKYHLNGRNSLANPGIAMATHKDDEERFFPSNGILIFGKQNAARDNADYSDVMLTSEEEIKTTNPVATEEYGIVADNLQQQNTAPQIGTVNSQGALPGMVWQNRDVYLQGPIWAKIPHTDGNFHPSPLMGGFGLKHPPPQILIKNTPVPADPPTTFNQSKLNSFITQYSTGQVSVEIEWELQKENSKRWNPEIQYTSNYYKSTSVDFAVIQKACTLNPAPLAPVTSPVI

SEQ ID NO: 5133 - DNA, 2217 bp, Adeno-associated virus 8; identical to SEQ ID NO: 5128
  source 1..2217: mol_type = genomic DNA

SEQ ID NO: 5134 - DNA, 4385 bp, Adeno-associated virus 9
  source 1..4385: mol_type = genomic DNA
cagagagggagtggccaactccatcactaggggtaatcgcgaagcgcctcccacgctgccgcgtcagcgctgacgtagattacgtcataggggagtggtcctgtattagctgtcacgtgagtgcttttgcgacattttgcgacaccacatggccatttgaggtatatatggccgagtgagcgagcaggatctccattttgaccgcgaaatttgaacgagcagcagccatgccgggcttctacgagattgtgatcaaggtgccgagcgacctggacgagcacctgccgggcatttctgactcttttgtgaactgggtggccgagaaggaatgggagctgcccccggattctgacatggatcggaatctgatcgagcaggcacccctgaccgtggccgagaagctgcagcgcgacttcctggtccaatggcgccgcgtgagtaaggccccggaggccctcttctttgttcagttcgagaagggcgagagctactttcacctgcacgttctggtcgagaccacgggggtcaagtccatggtgctaggccgcttcctgagtcagattcgggagaagctggtccagaccatctaccgcgggatcgagccgaccctgcccaactggttcgcggtgaccaagacgcgtaatggcgccggcggggggaacaaggtggtggacgagtgctacatccccaactacctcctgcccaagactcagcccgagctgcagtgggcgtggactaacatggaggagtatataagcgcgtgcttgaacctggccgagcgcaaacggctcgtggcgcagcacctgacccacgtcagccagacgcaggagcagaacaaggagaatctgaaccccaattctgacgcgcccgtgatcaggtcaaaaacctccgcgcgctacatggagctggtcgggtggctggtggaccggggcatcacctccgagaagcagtggatccaggaggaccaggcctcgtacatctccttcaacgccgcctccaactcgcggtcccagatcaaggccgcgctggacaatgccggcaagatcatggcgctgaccaaatccgcgcccgactacctggtaggcccttcacttccggtggacattacgcagaaccgcatctaccgcatcctgcagctcaacggctacgaccctgcctacgccggctccgtctttctcggctgggcacaaaagaagttcgggaaacgcaacaccatctggctgtttgggccggccaccacgggaaagaccaacatcgcagaagccattgcccacgccgtgcccttctacggctgcgtcaactggaccaatgagaactttcccttcaacgattgcgtcgacaagatggtgatctggtgggaggagggcaagatgacggccaaggtcgtggagtccgccaaggccattctcggcggcagcaaggtgcgcgtggaccaaaagtgcaagtcgtccgcccagatcgaccccactcccgtgatcgtcacctccaacaccaacatgtgcgccgtgattgacgggaacagcaccaccttcgagcaccagcagcctctccaggaccggatgtttaagttcgaactcacccgccgtctggagcacgactttggcaaggtgacaaagcaggaagtcaaagagttcttccgctgggccagtgatcacgtgaccgaggtggcgcatgagttttacgtcagaaagggcggagccagcaaaagacccgcccccgatgacgcggataaaagcgagcccaagcgggcctgcccctcagtcgcggatccatcgacgtcagacgcggaaggagctccggtggactttgccgacaggtaccaaaacaaatgttctcgtcacgcgggcatgcttcagatgctgcttccctgcaaaacgtgcgagagaatgaatcagaatttcaacatttgcttcacacacggggtcagagactgctcagagtgtttccccggcgtgtcagaatctcaaccggtcgtcagaaagaggacgtatcggaaactctgtgcgattcatcatctgctggggcgggctcccgagattgcttgctcggcctgcgatctggtcaacgtggacctggatgactgtgtttctgagcaataaatgacttaaaccaggtatggctgccgatggttatcttccagattggctcgaggacaacctctctgagggcattcgcgagtggtgggcgctgaaacctggagccccgaagcccaaagccaaccagcaaaagcaggacgacggccggggtctggtgcttcctggctacaagtacctcggacccttcaacggactcgacaagggggagcccgtcaacgcggcggacgcagcggccctcgagcacggcaaggcctacgaccagcagctgcaggcgggtgacaatccgtacctgcggtataaccacgccgacgccgagtttcaggagcgtctgcaagaagatacgtcttttgggggcaacctcgggcgagcagtcttccaggccaagaagcgggttctcgaacctctcggtctggttgaggaaggcgctaagacggctcctggaaagaagagaccggtagagccatcaccccagcgttctccagactcctctacgggcatcggcaagaaaggccaacagcccgccagaaaaagactcaattttggtcagactggcgactcagagtcagttccagaccctcaacctctcggagaacctccagcagcgccctctggtgtgggacctaatacaatggctgcaggcggtggcgcaccaatggcagacaataacgaaggcgccgacggagtgggtaattcctcgggaaattggcattgcgattccacatggctgggggacagagtcatcaccaccagcacccgaacctgggcattgcccacctacaacaaccacctctacaagcaaatctccaatggaacatcgggaggaagcaccaacgacaacacctactttggctacagcaccccctgggggtattttgacttcaacagattccactgccacttctcaccacgtgactggcagcgactcatcaacaacaactggggattccggccaaagagactcaacttcaagctgttcaacatccaggtcaaggaggttacgacgaacgaaggcaccaagaccatcgccaataaccttaccagcaccgtccaggtctttacggactcggagtaccagctaccgtacgtcctaggctctgcccaccaaggatgcctgccaccgtttcctgcagacgtcttcatggttcctcagtacggctacctgacgctcaacaatggaagtcaagcgttaggacgttcttctttctactgtctggaatacttcccttctcagatgctgagaaccggcaacaactttcagttcagctacactttcgaggacgtgcctttccacagcagctacgcacacagccagagtctagatcgactgatgaaccccctcatcgaccagtacctatactacctggtcagaacacagacaactggaactgggggaactcaaactttggcattcagccaagcaggccctagctcaatggccaatcaggctagaaactgggtacccgggccttgctaccgtcagcagcgcgtctccacaaccaccaaccaaaataacaacagcaactttgcgtggacgggagctgctaaattcaagctgaacgggagagactcgctaatgaatcctggcgtggctatggcatcgcacaaagacgacgaggaccgcttctttccatcaagtggcgttctcatatttggcaagcaaggagccgggaacgatggagtcgactacagccaggtgctgattacagatgaggaagaaattaaagccaccaaccctgtagccacagaggaatacggagcagtggccatcaacaaccaggccgctaacacgcaggcgcaaactggacttgtgcataaccagggagttattcctggtatggtctggcagaaccgggacgtgtacctgcagggccctatttgggctaaaatacctcacacagatggcaactttcacccgtctcctctgatgggtggatttggactgaaacacccacctccacagattctaattaaaaatacaccagtgccggcagatcctcctcttaccttcaatcaagccaagctgaactctttcatcacgcagtacagcacgggacaagtcagcgtggaaatcgagtgggagctgcagaaagaaaacagcaagcgctggaatccagagatccagtatacttcaaactactacaaatctacaaatgtggactttgctgtcaataccaaaggtgtttactctgagcctcgccccattggtactcgttacctcacccgtaatttgtaattgcctgttaatcaataaaccggttaattcgtttcagttgaactttggtctctgcg

SEQ ID NO: 5135 - DNA, 4382 bp, Adeno-associated virus 9
  source 1..4382: mol_type = genomic DNA
cagagagggagtggccaactccatcactaggggtaatcgcgaagcgcctcccacgctgccgcgtcagcgctgacgtagattacgtcataggggagtggtcctgtattagctgtcacgtgagtgcttttgcgacattttgcgacaccacatggccatttgaggtatatatggccgagtgagcgagcaggatctccattttgaccgcgaaatttgaacgagcagcagccatgccgggcttctacgagattgtgatcaaggtgccgagcgacctggacgagcacctgccgggcatttctgactcttttgtgaactgggtggccgagaaggaatgggagctgcccccggattctgacatggatcggaatctgatcgagcaggcacccctgaccgtggccgagaagctgtagcgcgacttcctggtccaatggcgccgcgtgagtaaggccccggaggccctcttctttgttcagttcgagaagggcgagagctactttcacctgcacgttctggtcgagaccacgggggtcaagtccatggtgctaggccgcttcctgagtcagattcgggagaagctggtccagaccatctaccgcgggatcgagccgaccctgcccaactggttcgcggtgaccaagacgcgtaatggcgccggcggggggaacaaggtggtggacgagtgctacatccccaactacctcctgcccaagactcagcccgagctgcagtgggcgtggactaacatggaggagtatataagcgcgtgcttgaacctggccgagcgcaaacggctcgtggcgcagcacctgacccacgtcagccagacgcaggagcagaacaaggagaatctgaaccccaattctgacgcgcccgtgatcaggtcaaaaacctccgcgcgctacatggagctggtcgggtggctggtggaccggggcatcacctccgagaagcagtggatccaggaggaccaggcctcgtacatctccttcaacgccgcctccaactcgcggtcccagatcaaggccgcgctggacaatgccggcaagatcatggcgctgaccaaatccgcgcccgactacctggtaggcccttcacttccggtggacattacgcagaaccgcatctaccgcatcctgcagctcaacggctacgaccctgcctacgccggctccgtctttctcggctgggcacaaaagaagttcgggaaacgcaacaccatctggctgtttgggccggccaccacgggaaagaccaacatcgcagaagccattgcccacgccgtgcccttctacggctgcgtcaactggaccaatgagaactttcccttcaacgattgcgtcgacaagatggtgatctggtgggaggagggcaagatgacggccaaggtcgtggagtccgccaaggccattctcggcggcagcaaggtgcgcgtggaccaaaagtgcaagtcgtccgcccagatcgaccccactcccgtgatcgtcacctccaacaccaacatgtgcgccgtgattgacgggaacagcaccaccttcgagcaccagcagcctctccaggaccggatgtttaagttcgaactcacccgccgtctggagcacgactttggcaaggtgacaaagcaggaagtcaaagagttcttccgctgggccagtgatcacgtgaccgaggtggcgcatgagttttacgtcagaaagggcggagccagcaaaagacccgcccccgatgacgcggataaaagcgagcccaagcgggcctgcccctcagtcgcggatccatcgacgtcagacgcggaaggagctccggtggactttgccgacaggtaccaaaacaaatgttctcgtcacgcgggcatgcttcagatgctgcttccctgcaaaacgtgcgagagaatgaatcagaatttcaacatttgcttcacacacggggtcagagactgctcagagtgtttccccggcgtgtcagaatctcaaccggtcgtcagaaagaggacgtatcggaaactctgtgcgattcatcatctgctggggcgggctcccgagattgcttgctcggcctgcgatctggtcaacgtggacctggatgactgtgtttctgagcaataaatgacttaaaccaggtatggctgccgatggttatcttccagattggctcgaggacaacctctctgagggcattcgcgagtggtgggacctgaaacctggagccccgaaacccaaagccaaccagcaaaagcaggacgacggccggggtctggtgcttcctggctacaagtacctcggacccttcaacggactcgacaagggggagcccgtcaacgcggcggacgcagcggccctcgagcacgacaaggcctacgaccagcagctcaaagcgggtgacaatccgtacctgcggtataaccacgccgacgccgagtttcaggagcgtctgcaagaagatacgtcttttgggggcaacctcgggcgagcagtcttccaggccaagaagcgggttctcgaacctctcggtctggttgaggaaggcgctaagacggctcctggaaagaagagaccggtagagcagtcaccccaagaaccagactcatcctcgggcatcggcaaatcaggccagcagcccgctaaaaagagactcaattttggtcagactggcgactcagagtcagtccccgacccacaacctctcggagaacctccagaagccccctcaggtctgggacctaatacaatggcttcaggcggtggcgctccaatggcagacaataacgaaggcgccgacggagtgggtaattcctcgggaaattggcattgcgattccacatggctgggggacagagtcatcaccaccagcacccgaacctgggcattgcccacctacaacaaccacctctacaagcaaatctccaatggaacatcgggaggaagcaccaacgacaacacctactttggctacagcaccccctgggggtattttgacttcaacagattccactgccacttctcaccacgtgactggcagcgactcatcaacaacaactggggattccggccaaagagactcaacttcaagctgttcaacatccaggtcaaggaggttacgacgaacgaaggcaccaagaccatcgccaataaccttaccagcaccgtccaggtctttacggactcggagtaccagctaccgtacgtcctaggctctgcccaccaaggatgcctgccaccgtttcctgcagacgtcttcatggttcctcagtacggctacctgacgctcaacaatggaagtcaagcgttaggacgttcttctttctactgtctggaatacttcccttctcagatgctgagaaccggcaacaactttcagttcagctacactttcgaggacgtgcctttccacagcagctacgcacacagccagagtctagatcgactgatgaaccccctcatcgaccagtacctatactacctggtcagaacacagacaactggaactgggggaactcaaactttggcattcagccaagcaggccctagctcaatggccaatcaggctagaaactgggtacccgggccttgctaccgtcagcagcgcgtctccacaaccaccaaccaaaataacaacagcaactttgcgtggacgggagctgctaaattcaagctgaacgggagagactcgctaatgaatcctggcgtggctatggcatcgcacaaagacgacgaggaccgcttctttccatcaagtggcgttctcatatttggcaagcaaggagccgggaacgatggagtcgactacagccaggtgctgattacagatgaggaagaaattaaagccaccaaccctgtagccacagaggaatacggagcagtggccatcaacaaccaggccgctaacacgcaggcgcaaactggacttgtgcataaccagggagttattcctggtatggtctggcagaaccgggacgtgtacctgcagggccctatttgggctaaaatacctcacacagatggcaactttcacccgtctcctctgatgggtggatttggactgaaacacccacctccacagattctaattaaaaatacaccagtgccggcagatcctcctcttaccttcaatcaagccaagctgaactctttcatcacgcagtacagcacgggacaagtcagcgtggaaatcgagtgggagctgcagaaagaaaacagcaagcgctggaatccagagatccagtatacttcaaactactacaaatctacaaatgtggactttgctgtcaataccgaaggtgtttactctgagcctcgccccattggtactcgttacctcacccgtaatttgtaattgcctgttaatcaataaaccggttaattcgtttcagttgaactttggtctctgcg

SEQ ID NO: 5136 - protein, 736 aa, Adeno-associated virus 9; identical to SEQ ID NO: 4768

SEQ ID NO: 5137 - protein, 736 aa, Adeno-associated virus 9
MAADGYLPDWLEDNLSEGIREWWDLKPGAPKPKANQQKQDDGRGLVLPGYKYLGPFNGLDKGEPVNAADAAALEHDKAYDQQLKAGDNPYLRYNHADAEFQERLQEDTSFGGNLGRAVFQAKKRVLEPLGLVEEGAKTAPGKKRPVEQSPQEPDSSSGIGKSGQQPAKKRLNFGQTGDSESVPDPQPLGEPPEAPSGLGPNTMASGGGAPMADNNEGADGVGNSSGNWHCDSTWLGDRVITTSTRTWALPTYNNHLYKQISNGTSGGSTNDNTYFGYSTPWGYFDFNRFHCHFSPRDWQRLINNNWGFRPKRLNFKLFNIQVKEVTTNEGTKTIANNLTSTVQVFTDSEYQLPYVLGSAHQGCLPPFPADVFMVPQYGYLTLNNGSQALGRSSFYCLEYFPSQMLRTGNNFQFSYTFEDVPFHSSYAHSQSLDRLMNPLIDQYLYYLVRTQTTGTGGTQTLAFSQAGPSSMANQARNWVPGPCYRQQRVSTTTNQNNNSNFAWTGAAKFKLNGRDSLMNPGVAMASHKDDEDRFFPSSGVLIFGKQGAGNDGVDYSQVLITDEEEIKATNPVATEEYGAVAINNQAANTQAQTGLVHNQGVIPGMVWQNRDVYLQGPIWAKIPHTDGNFHPSPLMGGFGLKHPPPQILIKNTPVPADPPLTFNQAKLNSFITQYSTGQVSVEIEWELQKENSKRWNPEIQYTSNYYKSTNVDFAVNTEGVYSEPRPIGTRYLTRNL

SEQ ID NO: 5138 - protein, 623 aa, Adeno-associated virus 9
MPGFYEIVIKVPSDLDEHLPGISDSFVNWVAEKEWELPPDSDMDRNLIEQAPLTVAEKLQRDFLVQWRRVSKAPEALFFVQFEKGESYFHLHVLVETTGVKSMVLGRFLSQIREKLVQTIYRGIEPTLPNWFAVTKTRNGAGGGNKVVDECYIPNYLLPKTQPELQWAWTNMEEYISACLNLAERKRLVAQHLTHVSQTQEQNKENLNPNSDAPVIRSKTSARYMELVGWLVDRGITSEKQWIQEDQASYISFNAASNSRSQIKAALDNAGKIMALTKSAPDYLVGPSLPVDITQNRIYRILQLNGYDPAYAGSVFLGWAQKKFGKRNTIWLFGPATTGKTNIAEAIAHAVPFYGCVNWTNENFPFNDCVDKMVIWWEEGKMTAKVVESAKAILGGSKVRVDQKCKSSAQIDPTPVIVTSNTNMCAVIDGNSTTFEHQQPLQDRMFKFELTRRLEHDFGKVTKQEVKEFFRWASDHVTEVAHEFYVRKGGASKRPAPDDADKSEPKRACPSVADPSTSDAEGAPVDFADRYQNKCSRHAGMLQMLLPCKTCERMNQNFNICFTHGVRDCSECFPGVSESQPVVRKRTYRKLCAIHHLLGRAPEIACSACDLVNVDLDDCVSEQ

SEQ ID NO: 5139 - DNA, 1797 bp, synthetic construct
  source 1..1797: mol_type = other DNA
acggctccgaccggagacaagcggaaaggcgaagacgaacctcgtttgcccgacacttcttcacagactcccaagaaaaacaagaagcctcgcaaggaaagaccttccggcggggcagaagatccgggcgaaggcacctcttccaacgctggagcagcagcacccgcctctagtgtgggatcatctatcatggctgaaggaggtggcggcccagtgggcgatgcaggccagggtgccgatggagtgggcaattcctccggaaattggcattgcgattcccaatggctggaaaacggagtcgtcactcgaaccacccgaacctgggtcttgcccagctacaacaaccacctgtacaaacgaatccaaggacccagcggaggcgacaacaacaacaaattctttggattcagcaccccctggggatactttgactacaatcgattccactgccacttttccccgcgagactggcaacgactcatcaacaacaactggggcatccgtcccaaagcgatgcgctttagactctttaacatccaggttaaagaggtcacggtccaagacttcaacaccaccatcggcaacaacctcaccagtacggtccaggtctttgcggacaaggactaccaactgccgtacgtcctcggatcggctaccgaaggcaccttcccgccgttcccagcggatatctacacgatcccgcagtacgggtactgcacgctaaactacaacaacgaggcggtggatcgttcggccttctactgtctggactactttccctcagacatgctgcggacaggaaataactttgagtttacttacaccttcgaggacgttcctttccatagcatgtttgcccacaaccagacgctagaccggctgatgaatcccctcgtggatcagtacctctgggctttcagctccgtcagccaagcaggctcatctggacgagctcttcattactcgcgggcgactaaaaccaacatggcggctcaatataggaactggttacctgggcctttcttccgtgatcagcaaatctttacgggcgctagcaacatcactaaaaataacgtctttagcgtttgggaaaaaggcaagcaatgggaactcgacaatcggaccaacctaatgcagcccggtcctgcggcagcgaccacctttagcggagaacctgaccgtcaagccatgcaaaacacgctggcttttagcaggaccgtctacgatcaaacgaccgccacgaccgatcgtaaccagatactcatcaccaacgaagacgaaatcagacccaccaactcggtcggtatcgacgcgtggggagcagttcccaccaacaaccagtcgatcgtgacccccggcactcgcgcggccgtcaacaatcaaggggcgcttcccgggatggtgtggcaaaacagagacatttaccctacagggacccatttggccaaaattcccgacactgacaatcacttccatccgtccccgcttattgggcggtttggctgcaagcatccccctccccagattttcattaaaaacacacccgtccctgccaacccttcggaaacgttccagacggccaaagtggcctccttcatcaaccagtactcgaccggacagtgcaccgtcgaaatcttttgggaactcaagaaggaaacctccaagcgctggaaccccgaaatccagttcacctccaactttggcaacgcggccgacatccagtttgccgtctccgacacgggatcctattccgaacctcgtcccatcggtacccgttaccttaccaaacctctgtaa

SEQ ID NO: 5140 - DNA, 1989 bp, synthetic construct
  source 1..1989: mol_type = other DNA
atgaggtcgtactacgaggtcatcgttcagctgcccaacgacgtcgagagtcaggtacctggaatctccgattcgttcgtcaactggattacgtcgcgagaatggacgttgcctgaggacgccgattgggatttggaccaggtcgatcaagttcaactgacgctcggcgacaaaatccaacgggagattcgaactcattgggggacgatggccaaagaaccggactttcactattttatccaactggaacaaggtgaggtgttctttcatttacacgtcctgctggaaacgtgttccgtaaagccgatggtactcggaagatatatccgacatattcaacaaaaaattgtgagtaaagtctactgcgccacgagcctacgatggaaggatggatgcgtggtgaccaagaccaaaaatttcgggggcgcgaacaaggtccgggccgagtcgtatattcccgcctacctgatcccgaaacagcaaccggaagtgcagtgggcgtggactaacgtgcccgagtatataaaagcgtgcttgcaccgagaactgcgtgccagtctcgcgcgacttcacttcgaggaggcgggcgtctcgcaatccaaggaaaatctcgcgagaactgcagacggcgctcccgtgatgccgacccgcgtcagcaaacgctacatggagctcgtggattggctcgtggagaaggggatcaccaccgagaaggaatggctgctggaaaacagagaaagctttcggagctttcaggcctcgagcaactcggcgcgtcagatcaagacggccctgcaaggcgccattcaggagatgcttctgaccaagacggcggaggactacctcgtcggaaaggatcccgtctcggacgacgacatccgtcagaaccgcatctacaagattctggaactgaaccactacgacccagcgtacgtggggagtattttggtcgggtggtgccagaagaaatggggcaagcgaaacacgctgtggctgttcggacatgcgaccaccggcaagaccaacatcgcggaggctattgcccatgctgtgccgttctatggatgcgttaactggaccaacgagaactttccgttcaacgactgcgtcgaaaaaatgattatctggtgggaggagggcaaaatgaccgccaaagtggtggaaacagccaaggcgattctgggaggatctcgggtgagagtggaccaaaaatgcaaagcttcggttccgatcgaaccgacgccggtcattattaccagtaacaccaacatgtgttatgtcatcgacgggaacacgaccacgttcgagcataagcagccgttggaggacaggatgtttaagctcgaattgctgactcggttgcctgatgactttggtaaggtgaccaaacaggaggtgcgtcaattcttcaggtggtctcaggatcacctgacccctgtgatcccagaattcctagtgcggaaggcggagtctcgcaaaagacccgccccttccggggaaggctatataagcccgacaaagcggcccgcgctcgcagagcagcagcaggcgtcggagagcgcggacccggttcccaccaggtatcgtatcaaatgctcgaaacattgcggtatggataaaatgttgtttccttgccaaatttgtgaatcgatgaacagagatattaatatttgtgctattcataaaacgaccgactgtaaagagtgtttccccgactacggggataaagatgatgtagaactacccccctgtacagaacacaacgtgtctcgttgttatcaatgtcattcgggcgaattgtatcgcgtgacttcggactctgacgagaaacctgcccccgagagtgatgaaggcaccgagccatcctatgctccctgcacgattcaccacctgatgggcaagagtcacgggttagtcacttgcgcggcgtgtcggttgaaaaatagtacgttgcatgatgacttggatgacggtgatctcgaacaataa

SEQ ID NO: 5141 - DNA, 1626 bp, synthetic construct
  source 1..1626: mol_type = other DNA
atgaggtcgtactacgaggtcatcgttcagctgcccaacgacgtcgagagtcaggtacctggaatctccgattcgttcgtcaactggattacgtcgcgagaatggacgttgcctgaggacgccgattgggatttggaccaggtcgatcaagttcaactgacgctcggcgacaaaatccaacgggagattcgaactcattgggggacgatggccaaagaaccggactttcactattttatccaactggaacaaggtgaggtgttctttcatttacacgtcctgctggaaacgtgttccgtaaagccgatggtactcggaagatatatccgacatattcaacaaaaaattgtgagtaaagtctactgcgccacgagcctacgatggaaggatggatgcgtggtgaccaagaccaaaaatttcgggggcgcgaacaaggtccgggccgagtcgtatattcccgcctacctgatcccgaaacagcaaccggaagtgcagtgggcgtggactaacgtgcccgagtatataaaagcgtgcttgcaccgagaactgcgtgccagtctcgcgcgacttcacttcgaggaggcgggcgtctcgcaatccaaggaaaatctcgcgagaactgcagacggcgctcccgtgatgccgacccgcgtcagcaaacgctacatggagctcgtggattggctcgtggagaaggggatcaccaccgagaaggaatggctgctggaaaacagagaaagctttcggagctttcaggcctcgagcaactcggcgcgtcagatcaagacggccctgcaaggcgccattcaggagatgcttctgaccaagacggcggaggactacctcgtcggaaaggatcccgtctcggacgacgacatccgtcagaaccgcatctacaagattctggaactgaaccactacgacccagcgtacgtggggagtattttggtcgggtggtgccagaagaaatggggcaagcgaaacacgctgtggctgttcggacatgcgaccaccggcaagaccaacatcgcggaggctattgcccatgctgtgccgttctatggatgcgttaactggaccaacgagaactttccgttcaacgactgcgtcgaaaaaatgattatctggtgggaggagggcaaaatgaccgccaaagtggtggaaacagccaaggcgattctgggaggatctcgggtgagagtggaccaaaaatgcaaagcttcggttccgatcgaaccgacgccggtcattattaccagtaacaccaacatgtgttatgtcatcgacgggaacacgaccacgttcgagcataagcagccgttggaggacaggatgtttaagctcgaattgctgactcggttgcctgatgactttggtaaggtgaccaaacaggaggtgcgtcaattcttcaggtggtctcaggatcacctgacccctgtgatcccagaattcctagtgcggaaggcggagtctcgcaaaagacccgccccttccggggaaggctatataagcccgacaaagcggcccgcgctcgcagagcagcagcaggcgtcggagagcgcggacccggttcccaccagattggttggagcggttggtcaaaaagggagtgaatgctgcagctga

SEQ ID NO: 5142 - DNA, 1323 bp, synthetic construct
  source 1..1323: mol_type = other DNA
atggagctcgtggattggctcgtggagaaggggatcaccaccgagaaggaatggctgctggaaaacagagaaagctttcggagctttcaggcctcgagcaactcggcgcgtcagatcaagacggccctgcaaggcgccattcaggagatgcttctgaccaagacggcggaggactacctcgtcggaaaggatcccgtctcggacgacgacatccgtcagaaccgcatctacaagattctggaactgaaccactacgacccagcgtacgtggggagtattttggtcgggtggtgccagaagaaatggggcaagcgaaacacgctgtggctgttcggacatgcgaccaccggcaagaccaacatcgcggaggctattgcccatgctgtgccgttctatggatgcgttaactggaccaacgagaactttccgttcaacgactgcgtcgaaaaaatgattatctggtgggaggagggcaaaatgaccgccaaagtggtggaaacagccaaggcgattctgggaggatctcgggtgagagtggaccaaaaatgcaaagcttcggttccgatcgaaccgacgccggtcattattaccagtaacaccaacatgtgttatgtcatcgacgggaacacgaccacgttcgagcataagcagccgttggaggacaggatgtttaagctcgaattgctgactcggttgcctgatgactttggtaaggtgaccaaacaggaggtgcgtcaattcttcaggtggtctcaggatcacctgacccctgtgatcccagaattcctagtgcggaaggcggagtctcgcaaaagacccgccccttccggggaaggctatataagcccgacaaagcggcccgcgctcgcagagcagcagcaggcgtcggagagcgcggacccggttcccaccaggtatcgtatcaaatgctcgaaacattgcggtatggataaaatgttgtttccttgccaaatttgtgaatcgatgaacagagatattaatatttgtgctattcataaaacgaccgactgtaaagagtgtttccccgactacggggataaagatgatgtagaactacccccctgtacagaacacaacgtgtctcgttgttatcaatgtcattcgggcgaattgtatcgcgtgacttcggactctgacgagaaacctgcccccgagagtgatgaaggcaccgagccatcctatgctccctgcacgattcaccacctgatgggcaagagtcacgggttagtcacttgcgcggcgtgtcggttgaaaaatagtacgttgcatgatgacttggatgacggtgatctcgaacaataa

SEQ ID NO: 5143 - DNA, 960 bp, synthetic construct
  source 1..960: mol_type = other DNA
atggagctcgtggattggctcgtggagaaggggatcaccaccgagaaggaatggctgctggaaaacagagaaagctttcggagctttcaggcctcgagcaactcggcgcgtcagatcaagacggccctgcaaggcgccattcaggagatgcttctgaccaagacggcggaggactacctcgtcggaaaggatcccgtctcggacgacgacatccgtcagaaccgcatctacaagattctggaactgaaccactacgacccagcgtacgtggggagtattttggtcgggtggtgccagaagaaatggggcaagcgaaacacgctgtggctgttcggacatgcgaccaccggcaagaccaacatcgcggaggctattgcccatgctgtgccgttctatggatgcgttaactggaccaacgagaactttccgttcaacgactgcgtcgaaaaaatgattatctggtgggaggagggcaaaatgaccgccaaagtggtggaaacagccaaggcgattctgggaggatctcgggtgagagtggaccaaaaatgcaaagcttcggttccgatcgaaccgacgccggtcattattaccagtaacaccaacatgtgttatgtcatcgacgggaacacgaccacgttcgagcataagcagccgttggaggacaggatgtttaagctcgaattgctgactcggttgcctgatgactttggtaaggtgaccaaacaggaggtgcgtcaattcttcaggtggtctcaggatcacctgacccctgtgatcccagaattcctagtgcggaaggcggagtctcgcaaaagacccgccccttccggggaaggctatataagcccgacaaagcggcccgcgctcgcagagcagcagcaggcgtcggagagcgcggacccggttcccaccagattggttggagcggttggtcaaaaagggagtgaatgctgcagctga

SEQ ID NO: 5144 - DNA, 1608 bp, synthetic construct
  source 1..1608: mol_type = other DNA
atggctgaaggaggtggcggcccagtgggcgatgcaggccagggtgccgatggagtgggcaattcctccggaaattggcattgcgattcccaatggctggaaaacggagtcgtcactcgaaccacccgaacctgggtcttgcccagctacaacaaccacctgtacaaacgaatccaaggacccagcggaggcgacaacaacaacaaattctttggattcagcaccccctggggatactttgactacaatcgattccactgccacttttccccgcgagactggcaacgactcatcaacaacaactggggcatccgtcccaaagcgatgcgctttagactctttaacatccaggttaaagaggtcacggtccaagacttcaacaccaccatcggcaacaacctcaccagtacggtccaggtctttgcggacaaggactaccaactgccgtacgtcctcggatcggctaccgaaggcaccttcccgccgttcccagcggatatctacacgatcccgcagtacgggtactgcacgctaaactacaacaacgaggcggtggatcgttcggccttctactgtctggactactttccctcagacatgctgcggacaggaaataactttgagtttacttacaccttcgaggacgttcctttccatagcatgtttgcccacaaccagacgctagaccggctgatgaatcccctcgtggatcagtacctctgggctttcagctccgtcagccaagcaggctcatctggacgagctcttcattactcgcgggcgactaaaaccaacatggcggctcaatataggaactggttacctgggcctttcttccgtgatcagcaaatctttacgggcgctagcaacatcactaaaaataacgtctttagcgtttgggaaaaaggcaagcaatgggaactcgacaatcggaccaacctaatgcagcccggtcctgcggcagcgaccacctttagcggagaacctgaccgtcaagccatgcaaaacacgctggcttttagcaggaccgtctacgatcaaacgaccgccacgaccgatcgtaaccagatactcatcaccaacgaagacgaaatcagacccaccaactcggtcggtatcgacgcgtggggagcagttcccaccaacaaccagtcgatcgtgacccccggcactcgcgcggccgtcaacaatcaaggggcgcttcccgggatggtgtggcaaaacagagacatttaccctacagggacccatttggccaaaattcccgacactgacaatcacttccatccgtccccgcttattgggcggtttggctgcaagcatccccctccccagattttcattaaaaacacacccgtccctgccaacccttcggaaacgttccagacggccaaagtggcctccttcatcaaccagtactcgaccggacagtgcaccgtcgaaatcttttgggaactcaagaaggaaacctccaagcgctggaaccccgaaatccagttcacctccaactttggcaacgcggccgacatccagtttgccgtctccgacacgggatcctattccgaacctcgtcccatcggtacccgttaccttaccaaacctctgtaa

SEQ ID NO: 5145 - DNA, 2232 bp, synthetic construct
  source 1..2232: mol_type = other DNA
atgtctctcatttctgatgcgattccagattggttggagcggttggtcaaaaagggagtgaatgctgcagctgatttctaccatttggaaagcggtcctcctcgtcctaaggcaaatcagcaaactcaagaatctcttgaaaaggacgattcgagaggtctcgtgttcccaggctacaattatctaggccctttcaacggtctagataaaggagaacccgtcaacgaggcagacgctgccgccttagaacacgacaaggcttacgacctcgaaatcaaggacgggcacaacccgtactttgagtacaacgaggccgacagacgtttccaggaacgtctcaaagacgatacctcctttggaggcaatttaggtaaagccatcttccaggccaaaaagagggttctcgaaccctttggtctggtggaagactcaaagacggctccgaccggagacaagcggaaaggcgaagacgaacctcgtttgcccgacacttcttcacagactcccaagaaaaacaagaagcctcgcaaggaaagaccttccggcggggcagaagatccgggcgaaggcacctcttccaacgctggagcagcagcacccgcctctagtgtgggatcatctatcatggctgaaggaggtggcggcccagtgggcgatgcaggccagggtgccgatggagtgggcaattcctccggaaattggcattgcgattcccaatggctggaaaacggagtcgtcactcgaaccacccgaacctgggtcttgcccagctacaacaaccacctgtacaaacgaatccaaggacccagcggaggcgacaacaacaacaaattctttggattcagcaccccctggggatactttgactacaatcgattccactgccacttttccccgcgagactggcaacgactcatcaacaacaactggggcatccgtcccaaagcgatgcgctttagactctttaacatccaggttaaagaggtcacggtccaagacttcaacaccaccatcggcaacaacctcaccagtacggtccaggtctttgcggacaaggactaccaactgccgtacgtcctcggatcggctaccgaaggcaccttcccgccgttcccagcggatatctacacgatcccgcagtacgggtactgcacgctaaactacaacaacgaggcggtggatcgttcggccttctactgtctggactactttccctcagacatgctgcggacaggaaataactttgagtttacttacaccttcgaggacgttcctttccatagcatgtttgcccacaaccagacgctagaccggctgatgaatcccctcgtggatcagtacctctgggctttcagctccgtcagccaagcaggctcatctggacgagctcttcattactcgcgggcgactaaaaccaacatggcggctcaatataggaactggttacctgggcctttcttccgtgatcagcaaatctttacgggcgctagcaacatcactaaaaataacgtctttagcgtttgggaaaaaggcaagcaatgggaactcgacaatcggaccaacctaatgcagcccggtcctgcggcagcgaccacctttagcggagaacctgaccgtcaagccatgcaaaacacgctggcttttagcaggaccgtctacgatcaaacgaccgccacgaccgatcgtaaccagatactcatcaccaacgaagacgaaatcagacccaccaactcggtcggtatcgacgcgtggggagcagttcccaccaacaaccagtcgatcgtgacccccggcactcgcgcggccgtcaacaatcaaggggcgcttcccgggatggtgtggcaaaacagagacatttaccctacagggacccatttggccaaaattcccgacactgacaatcacttccatccgtccccgcttattgggcggtttggctgcaagcatccccctccccagattttcattaaaaacacacccgtccctgccaacccttcggaaacgttccagacggccaaagtggcctccttcatcaaccagtactcgaccggacagtgcaccgtcgaaatcttttgggaactcaagaaggaaacctccaagcgctggaaccccgaaatccagttcacctccaactttggcaacgcggccgacatccagtttgccgtctccgacacgggatcctattccgaacctcgtcccatcggtacccgttaccttaccaaacctctgtaa

SEQ ID NO: 5146 - protein, 535 aa, synthetic construct
MAEGGGGPVGDAGQGADGVGNSSGNWHCDSQWLENGVVTRTTRTWVLPSYNNHLYKRIQGPSGGDNNNKFFGFSTPWGYFDYNRFHCHFSPRDWQRLINNNWGIRPKAMRFRLFNIQVKEVTVQDFNTTIGNNLTSTVQVFADKDYQLPYVLGSATEGTFPPFPADIYTIPQYGYCTLNYNNEAVDRSAFYCLDYFPSDMLRTGNNFEFTYTFEDVPFHSMFAHNQTLDRLMNPLVDQYLWAFSSVSQAGSSGRALHYSRATKTNMAAQYRNWLPGPFFRDQQIFTGASNITKNNVFSVWEKGKQWELDNRTNLMQPGPAAATTFSGEPDRQAMQNTLAFSRTVYDQTTATTDRNQILITNEDEIRPTNSVGIDAWGAVPTNNQSIVTPGTRAAVNNQGALPGMVWQNRDIYPTGTHLAKIPDTDNHFHPSPLIGRFGCKHPPPQIFIKNTPVPANPSETFQTAKVASFINQYSTGQCTVEIFWELKKETSKRWNPEIQFTSNFGNAADIQFAVSDTGSYSEPRPIGTRYLTKPL

SEQ ID NO: 5147 - protein, 440 aa, synthetic construct
MELVDWLVEKGITTEKEWLLENRESFRSFQASSNSARQIKTALQGAIQEMLLTKTAEDYLVGKDPVSDDDIRQNRIYKILELNHYDPAYVGSILVGWCQKKWGKRNTLWLFGHATTGKTNIAEAIAHAVPFYGCVNWTNENFPFNDCVEKMIIWWEEGKMTAKVVETAKAILGGSRVRVDQKCKASVPIEPTPVIITSNTNMCYVIDGNTTTFEHKQPLEDRMFKLELLTRLPDDFGKVTKQEVRQFFRWSQDHLTPVIPEFLVRKAESRKRPAPSGEGYISPTKRPALAEQQQASESADPVPTRYRIKCSKHCGMDKMLFPCQICESMNRDINICAIHKTTDCKECFPDYGDKDDVELPPCTEHNVSRCYQCHSGELYRVTSDSDEKPAPESDEGTEPSYAPCTIHHLMGKSHGLVTCAACRLKNSTLHDDLDDGDLEQ

SEQ ID NO: 5148 - protein, 319 aa, synthetic construct
MELVDWLVEKGITTEKEWLLENRESFRSFQASSNSARQIKTALQGAIQEMLLTKTAEDYLVGKDPVSDDDIRQNRIYKILELNHYDPAYVGSILVGWCQKKWGKRNTLWLFGHATTGKTNIAEAIAHAVPFYGCVNWTNENFPFNDCVEKMIIWWEEGKMTAKVVETAKAILGGSRVRVDQKCKASVPIEPTPVIITSNTNMCYVIDGNTTTFEHKQPLEDRMFKLELLTRLPDDFGKVTKQEVRQFFRWSQDHLTPVIPEFLVRKAESRKRPAPSGEGYISPTKRPALAEQQQASESADPVPTRLVGAVGQKGSECCS

SEQ ID NO: 5149 - protein, 662 aa, synthetic construct
MRSYYEVIVQLPNDVESQVPGISDSFVNWITSREWTLPEDADWDLDQVDQVQLTLGDKIQREIRTHWGTMAKEPDFHYFIQLEQGEVFFHLHVLLETCSVKPMVLGRYIRHIQQKIVSKVYCATSLRWKDGCVVTKTKNFGGANKVRAESYIPAYLIPKQQPEVQWAWTNVPEYIKACLHRELRASLARLHFEEAGVSQSKENLARTADGAPVMPTRVSKRYMELVDWLVEKGITTEKEWLLENRESFRSFQASSNSARQIKTALQGAIQEMLLTKTAEDYLVGKDPVSDDDIRQNRIYKILELNHYDPAYVGSILVGWCQKKWGKRNTLWLFGHATTGKTNIAEAIAHAVPFYGCVNWTNENFPFNDCVEKMIIWWEEGKMTAKVVETAKAILGGSRVRVDQKCKASVPIEPTPVIITSNTNMCYVIDGNTTTFEHKQPLEDRMFKLELLTRLPDDFGKVTKQEVRQFFRWSQDHLTPVIPEFLVRKAESRKRPAPSGEGYISPTKRPALAEQQQASESADPVPTRYRIKCSKHCGMDKMLFPCQICESMNRDINICAIHKTTDCKECFPDYGDKDDVELPPCTEHNVSRCYQCHSGELYRVTSDSDEKPAPESDEGTEPSYAPCTIHHLMGKSHGLVTCAACRLKNSTLHDDLDDGDLEQ

SEQ ID NO: 5150 - protein, 541 aa, synthetic construct
MRSYYEVIVQLPNDVESQVPGISDSFVNWITSREWTLPEDADWDLDQVDQVQLTLGDKIQREIRTHWGTMAKEPDFHYFIQLEQGEVFFHLHVLLETCSVKPMVLGRYIRHIQQKIVSKVYCATSLRWKDGCVVTKTKNFGGANKVRAESYIPAYLIPKQQPEVQWAWTNVPEYIKACLHRELRASLARLHFEEAGVSQSKENLARTADGAPVMPTRVSKRYMELVDWLVEKGITTEKEWLLENRESFRSFQASSNSARQIKTALQGAIQEMLLTKTAEDYLVGKDPVSDDDIRQNRIYKILELNHYDPAYVGSILVGWCQKKWGKRNTLWLFGHATTGKTNIAEAIAHAVPFYGCVNWTNENFPFNDCVEKMIIWWEEGKMTAKVVETAKAILGGSRVRVDQKCKASVPIEPTPVIITSNTNMCYVIDGNTTTFEHKQPLEDRMFKLELLTRLPDDFGKVTKQEVRQFFRWSQDHLTPVIPEFLVRKAESRKRPAPSGEGYISPTKRPALAEQQQASESADPVPTRLVGAVGQKGSECCS

SEQ ID NO: 5151 - protein, 743 aa, synthetic construct
MSLISDAIPDWLERLVKKGVNAAADFYHLESGPPRPKANQQTQESLEKDDSRGLVFPGYNYLGPFNGLDKGEPVNEADAAALEHDKAYDLEIKDGHNPYFEYNEADRRFQERLKDDTSFGGNLGKAIFQAKKRVLEPFGLVEDSKTAPTGDKRKGEDEPRLPDTSSQTPKKNKKPRKERPSGGAEDPGEGTSSNAGAAAPASSVGSSIMAEGGGGPVGDAGQGADGVGNSSGNWHCDSQWLENGVVTRTTRTWVLPSYNNHLYKRIQGPSGGDNNNKFFGFSTPWGYFDYNRFHCHFSPRDWQRLINNNWGIRPKAMRFRLFNIQVKEVTVQDFNTTIGNNLTSTVQVFADKDYQLPYVLGSATEGTFPPFPADIYTIPQYGYCTLNYNNEAVDRSAFYCLDYFPSDMLRTGNNFEFTYTFEDVPFHSMFAHNQTLDRLMNPLVDQYLWAFSSVSQAGSSGRALHYSRATKTNMAAQYRNWLPGPFFRDQQIFTGASNITKNNVFSVWEKGKQWELDNRTNLMQPGPAAATTFSGEPDRQAMQNTLAFSRTVYDQTTATTDRNQILITNEDEIRPTNSVGIDAWGAVPTNNQSIVTPGTRAAVNNQGALPGMVWQNRDIYPTGTHLAKIPDTDNHFHPSPLIGRFGCKHPPPQIFIKNTPVPANPSETFQTAKVASFINQYSTGQCTVEIFWELKKETSKRWNPEIQFTSNFGNAADIQFAVSDTGSYSEPRPIGTRYLTKPL

SEQ ID NO: 5152 - protein, 598 aa, synthetic construct
TAPTGDKRKGEDEPRLPDTSSQTPKKNKKPRKERPSGGAEDPGEGTSSNAGAAAPASSVGSSIMAEGGGGPVGDAGQGADGVGNSSGNWHCDSQWLENGVVTRTTRTWVLPSYNNHLYKRIQGPSGGDNNNKFFGFSTPWGYFDYNRFHCHFSPRDWQRLINNNWGIRPKAMRFRLFNIQVKEVTVQDFNTTIGNNLTSTVQVFADKDYQLPYVLGSATEGTFPPFPADIYTIPQYGYCTLNYNNEAVDRSAFYCLDYFPSDMLRTGNNFEFTYTFEDVPFHSMFAHNQTLDRLMNPLVDQYLWAFSSVSQAGSSGRALHYSRATKTNMAAQYRNWLPGPFFRDQQIFTGASNITKNNVFSVWEKGKQWELDNRTNLMQPGPAAATTFSGEPDRQAMQNTLAFSRTVYDQTTATTDRNQILITNEDEIRPTNSVGIDAWGAVPTNNQSIVTPGTRAAVNNQGALPGMVWQNRDIYPTGTHLAKIPDTDNHFHPSPLIGRFGCKHPPPQIFIKNTPVPANPSETFQTAKVASFINQYSTGQCTVEIFWELKKETSKRWNPEIQFTSNFGNAADIQFAVSDTGSYSEPRPIGTRYLTKPL

SEQ ID NO: 5153 - DNA, 4694 bp, synthetic construct
  source 1..4694: mol_type = other DNA
tggccagtttccaagacaggctcgctcgctcactcgggccggggccccaaaggggcccctagcgaccgcttcgcggtcgcggcccgagtgagcgagcgagcctgtcttggaaactggccagcactccggtgaggtaatgccgtcacgtggtcgggaatgggaacgggaaatctcgcgagaacgtaaacaaatataagacggcgccacacggcgctgcgtcatacgcgcgcgcgcaccggcgagatgaggtcgtactacgaggtcatcgttcagctgcccaacgacgtcgagagtcaggtacctggaatctccgattcgttcgtcaactggattacgtcgcgagaatggacgttgcctgaggacgccgattgggatttggaccaggtcgatcaagttcaactgacgctcggcgacaaaatccaacgggagattcgaactcattgggggacgatggccaaagaaccggactttcactattttatccaactggaacaaggtgaggtgttctttcatttacacgtcctgctggaaacgtgttccgtaaagccgatggtactcggaagatatatccgacatattcaacaaaaaattgtgagtaaagtctactgcgccacgagcctacgatggaaggatggatgcgtggtgaccaagaccaaaaatttcgggggcgcgaacaaggtccgggccgagtcgtatattcccgcctacctgatcccgaaacagcaaccggaagtgcagtgggcgtggactaacgtgcccgagtatataaaagcgtgcttgcaccgagaactgcgtgccagtctcgcgcgacttcacttcgaggaggcgggcgtctcgcaatccaaggaaaatctcgcgagaactgcagacggcgctcccgtgatgccgacccgcgtcagcaaacgctacatggagctcgtggattggctcgtggagaaggggatcaccaccgagaaggaatggctgctggaaaacagagaaagctttcggagctttcaggcctcgagcaactcggcgcgtcagatcaagacggccctgcaaggcgccattcaggagatgcttctgaccaagacggcggaggactacctcgtcggaaaggatcccgtctcggacgacgacatccgtcagaaccgcatctacaagattctggaactgaaccactacgacccagcgtacgtggggagtattttggtcgggtggtgccagaagaaatggggcaagcgaaacacgctgtggctgttcggacatgcgaccaccggcaagaccaacatcgcggaggctattgcccatgctgtgccgttctatggatgcgttaactggaccaacgagaactttccgttcaacgactgcgtcgaaaaaatgattatctggtgggaggagggcaaaatgaccgccaaagtggtggaaacagccaaggcgattctgggaggatctcgggtgagagtggaccaaaaatgcaaagcttcggttccgatcgaaccgacgccggtcattattaccagtaacaccaacatgtgttatgtcatcgacgggaacacgaccacgttcgagcataagcagccgttggaggacaggatgtttaagctcgaattgctgactcggttgcctgatgactttggtaaggtgaccaaacaggaggtgcgtcaattcttcaggtggtctcaggatcacctgacccctgtgatcccagaattcctagtgcggaaggcggagtctcgcaaaagacccgccccttccggggaaggctatataagcccgacaaagcggcccgcgctcgcagagcagcagcaggcgtcggagagcgcggacccggttcccaccaggtatcgtatcaaatgctcgaaacattgcggtatggataaaatgttgtttccttgccaaatttgtgaatcgatgaacagagatattaatatttgtgctattcataaaacgaccgactgtaaagagtgtttccccgactacggggataaagatgatgtagaactacccccctgtacagaacacaacgtgtctcgttgttatcaatgtcattcgggcgaattgtatcgcgtgacttcggactctgacgagaaacctgcccccgagagtgatgaaggcaccgagccatcctatgctccctgcacgattcaccacctgatgggcaagagtcacgggttagtcacttgcgcggcgtgtcggttgaaaaatagtacgttgcatgatgacttggatgacggtgatctcgaacaataaatgattgaaatgtagccatgtctctcatttctgatgcgattccagattggttggagcggttggtcaaaaagggagtgaatgctgcagctgatttctaccatttggaaagcggtcctcctcgtcctaaggcaaatcagcaaactcaagaatctcttgaaaaggacgattcgagaggtctcgtgttcccaggctacaattatctaggccctttcaacggtctagataaaggagaacccgtcaacgaggcagacgctgccgccttagaacacgacaaggcttacgacctcgaaatcaaggacgggcacaacccgtactttgagtacaacgaggccgacagacgtttccaggaacgtctcaaagacgatacctcctttggaggcaatttaggtaaagccatcttccaggccaaaaagagggttctcgaaccctttggtctggtggaagactcaaagacggctccgaccggagacaagcggaaaggcgaagacgaacctcgtttgcccgacacttcttcacagactcccaagaaaaacaagaagcctcgcaaggaaagaccttccggcggggcagaagatccgggcgaaggcacctcttccaacgctggagcagcagcacccgcctctagtgtgggatcatctatcatggctgaaggaggtggcggcccagtgggcgatgcaggccagggtgccgatggagtgggcaattcctccggaaattggcattgcgattcccaatggctggaaaacggagtcgtcactcgaaccacccgaacctgggtcttgcccagctacaacaaccacctgtacaaacgaatccaaggacccagcggaggcgacaacaacaacaaattctttggattcagcaccccctggggatactttgactacaatcgattccactgccacttttccccgcgagactggcaacgactcatcaacaacaactggggcatccgtcccaaagcgatgcgctttagactctttaacatccaggttaaagaggtcacggtccaagacttcaacaccaccatcggcaacaacctcaccagtacggtccaggtctttgcggacaaggactaccaactgccgtacgtcctcggatcggctaccgaaggcaccttcccgccgttcccagcggatatctacacgatcccgcagtacgggtactgcacgctaaactacaacaacgaggcggtggatcgttcggccttctactgtctggactactttccctcagacatgctgcggacaggaaataactttgagtttacttacaccttcgaggacgttcctttccatagcatgtttgcccacaaccagacgctagaccggctgatgaatcccctcgtggatcagtacctctgggctttcagctccgtcagccaagcaggctcatctggacgagctcttcattactcgcgggcgactaaaaccaacatggcggctcaatataggaactggttacctgggcctttcttccgtgatcagcaaatctttacgggcgctagcaacatcactaaaaataacgtctttagcgtttgggaaaaaggcaagcaatgggaactcgacaatcggaccaacctaatgcagcccggtcctgcggcagcgaccacctttagcggagaacctgaccgtcaagccatgcaaaacacgctggcttttagcaggaccgtctacgatcaaacgaccgccacgaccgatcgtaaccagatactcatcaccaacgaagacgaaatcagacccaccaactcggtcggtatcgacgcgtggggagcagttcccaccaacaaccagtcgatcgtgacccccggcactcgcgcggccgtcaacaatcaaggggcgcttcccgggatggtgtggcaaaacagagacatttaccctacagggacccatttggccaaaattcccgacactgacaatcacttccatccgtccccgcttattgggcggtttggctgcaagcatccccctccccagattttcattaaaaacacacccgtccctgccaacccttcggaaacgttccagacggccaaagtggcctccttcatcaaccagtactcgaccggacagtgcaccgtcgaaatcttttgggaactcaagaaggaaacctccaagcgctggaaccccgaaatccagttcacctccaactttggcaacgcggccgacatccagtttgccgtctccgacacgggatcctattccgaacctcgtcccatcggtacccgttaccttaccaaacctctgtaaattaaacccttcaataaaccgtttatgcgtaactgtatttccgtctcctgtcgttattcagtcacatgatgcggcattacctcaccggagtgctggccagtttccaagacaggctcgctcgctcactcgggccggggccccaaaggggcccctagcgaccgcttcgcggtcgcggcccgagtgagcgagcgagcctgtcttggaaactggcca

SEQ ID NO: 5154 - DNA, 2211 bp, synthetic construct
  source 1..2211: mol_type = other DNA
atggctgctgatggttatcttccagattggctcgaggacactctctctgaaggaataagacagtggtggaagctcaaacctggcccaccaccaccaaagcccgcagagcggcataaggacgacagcaggggtcttgtgcttcctgggtacaagtacctcggacccttcaacggactcgacaagggagagccggtcaacgaggcagacgcagcggccctcgagcacgacaaggcctacgaccagcagctcaaggccggtgacaacccctacctcaagtacaaccacgccgacgcggagttccagcagcggcttcagggcgacacatcgtttgggggcaacctcggcagagcagtcttccaggccaaaaagagggttcttgaacctcttggtctggttgagcaagcgggtgagacggctcctggaaagaagagaccgttgattgaatccccccagcagcccgactcctccacgggtatcggcaaaaaaggcaagcagccggctaaaaagagactcaattttggtcagactggcgactcagagtcagtccccgacccacaacctctcggagaacctccagcaacccccgctgctgtgggacctactacaatggcttcaggtggtggcgcaccaatggcagacaataacgaaggcgccgacggagtgggtaatgcctcaggaaattggcattgcgattccacatggctgggcgacagagtcatcaccaccagcacccgcacctgggccttgcccacctacaataaccacctctacaagcaaatctccagtgcttcaacgggggccagcaacgacaaccactacttcggctacagcaccccctgggggtattttgacttcaacagattccactgccacttttcaccacgtgactggcagcgactcatcaacaacaattggggattccggcccaagagactcaacttcaaactcttcaacatccaagtcaaggaggtcacgacgaatgatggcgtcacaaccatcgctaataaccttaccagcacggttcaagtcttctcggactcagactatcagctcccgtacgtgctcgggtcggctcacgagggctgcctcccgccgttcccagcagacgtcttcatggtgccacagtatggatacctcaccctgaacaacgggagtcaggcagtaggacgctcttcattttactgcctggagtactttccttctcagatgctgcgtaccggaaacaactttaccttcagctacacttttgaggacgttcctttccacagcagctacgctcacagccagagtctggaccgtctcatgaatcctctcatcgaccagtacctgtattacctgaacagaactcagaatcagtccggaagtgcccaaaacaaggacttgctgtttagccgggggtctccagctggcatgtctgttcagcccaaaaactggctacctggaccctgttatcggcagcagcgcgtttctaaaacaaaaacagacaacaacaacagcaactttacctggactggtgcttcaaaatataaccttaatgggcgtgaatctataatcaaccctggcactgctatggcctcacacaaagacgacaaagacaagttctttcccatgagcggtgtcatgatttttggaaaggagagcgccggagcttcaaacactgcattggacaatgtcatgatcacagacgaagaggaaatcaaagccactaaccccgtggccaccgaaagatttgggactgtggcagtcaatctccagagcagcagcacagaccctgcgaccggagatgtgcatgttatgggagccttacctggaatggtgtggcaagacagagacgtatacctgcagggtcccatttgggccaaaattcctcacacagatggacactttcacccgtctcctcttatgggcggctttggactcaagaacccgcctcctcagatcctcatcaaaaacacgcctgttcctgcgaatcctccggcggagttttcagctacaaagtttgcttcattcatcacccaatactccacaggacaagtgagtgtggaaattgaatgggagctgcagaaagaaaacagcaagcgctggaatcccgaagtgcagtacacatccaattatgcaaaatctgccaacgttgattttactgtggacaacaatggactttatactgagcctcgccccattggcacccgttacctcacccgtcccctgtaa

SEQ ID NO: 5155 - protein, 736 aa, synthetic construct
MAADGYLPDWLEDTLSEGIRQWWKLKPGPPPPKPAERHKDDSRGLVLPGYKYLGPFNGLDKGEPVNEADAAALEHDKAYDQQLKAGDNPYLKYNHADAEFQQRLQGDTSFGGNLGRAVFQAKKRVLEPLGLVEQAGETAPGKKRPLIESPQQPDSSTGIGKKGKQPAKKRLNFGQTGDSESVPDPQPLGEPPATPAAVGPTTMASGGGAPMADNNEGADGVGNASGNWHCDSTWLGDRVITTSTRTWALPTYNNHLYKQISSASTGASNDNHYFGYSTPWGYFDFNRFHCHFSPRDWQRLINNNWGFRPKRLNFKLFNIQVKEVTTNDGVTTIANNLTSTVQVFSDSDYQLPYVLGSAHEGCLPPFPADVFMVPQYGYLTLNNGSQAVGRSSFYCLEYFPSQMLRTGNNFTFSYTFEDVPFHSSYAHSQSLDRLMNPLIDQYLYYLNRTQNQSGSAQNKDLLFSRGSPAGMSVQPKNWLPGPCYRQQRVSKTKTDNNNSNFTWTGASKYNLNGRESIINPGTAMASHKDDKDKFFPMSGVMIFGKESAGASNTALDNVMITDEEEIKATNPVATERFGTVAVNLQSSSTDPATGDVHVMGALPGMVWQDRDVYLQGPIWAKIPHTDGHFHPSPLMGGFGLKNPPPQILIKNTPVPANPPAEFSATKFASFITQYSTGQVSVEIEWELQKENSKRWNPEVQYTSNYAKSANVDFTVDNNGLYTEPRPIGTRYLTRPL

SEQ ID NO: 5156 - DNA, 2211 bp, synthetic construct
  source 1..2211: mol_type = other DNA
atggcttccgatggttatcttccagattggctcgaggacaacctctctgagggcatccgcgagtggtgggacttgaaacctggagccccgaaacccaaagccaaccagcaaaagcaggacgacggccggggtctggtgcttcctggctacaagtacctcggacccttcaacggactcgacaagggggagcccgtcaacgcggcggatgcagcggccctcgagcacgacaaggcctacgaccagcagctcagagcgggtgacaatccgtacctgcggtataaccacgccgacgccgagtttcaggagcgtctgcaagaagatacgtcttttgggggcaacctcgggcgagcagtcttccaggccaagaagagggttctcgaaccttttggtctggttgaggaaggtgctaagacggctcctggaaagaaacgtccggtagagcagtcgccacaagagccagactcctcctcgggcattggcaagacaggccagcagcccgctaaaaagagactcaattttggtcagactggcgactcagagtcagtccccgacccacaacctctcggagaacctccagcaacccccgctgctgtgggacctactacaatggcttcaggcggtggcgcaccaatggcagacaataacgaaggcgccgacggagtgggtaatgcctcaggaaattggcattgcgattccacatggctgggcgacagagtcatcaccaccagcacccgaacatgggccttgcccacctataacaaccacctctacaagcaaatctccagtgcttcaacgggggccagcaacgacaaccactacttcggctacagcaccccctgggggtattttgatttcaacagattccactgccatttctcaccacgtgactggcagcgactcatcaacaacaattggggattccggcccaagagactcaacttcaaactcttcaacatccaagtcaaggaggtcacgacgaatgatggcgtcacaaccatcgctaataaccttaccagcacggttcaagtcttctcggactcggagtaccagcttccgtacgtcctcggctctgcgcaccagggctgcctccctccgttcccggcggacgtgttcatgattccgcagtacggctacctaacgctcaacaatggcagccaggcagtgggacggtcatccttttactgcctggaatatttcccatcgcagatgctgagaacgggcaataactttaccttcagctacaccttcgaggacgtgcctttccacagcagctacgcgcacagccagagcctggaccggctgatgaatcctctcatcgaccagtacctgtattacctgaacagaactcagaatcagtccggaagtgcccaaaacaaggacttgctgtttagccgggggtctccagctggcatgtctgttcagcccaaaaactggctacctggaccctgttaccggcagcagcgcgtttctaaaacaaaaacagacaacaacaacagcaactttacctggactggtgcttcaaaatataaccttaatgggcgtgaatctataatcaaccctggcactgctatggcctcacacaaagacgacaaagacaagttctttcccatgagcggtgtcatgatttttggaaaggagagcgccggagcttcaaacactgcattggacaatgtcatgatcacagacgaagaggaaatcaaagccactaaccccgtggccaccgaaagatttgggactgtggcagtcaatctccagagcagcagcacagaccctgcgaccggagatgtgcatgttatgggagccttacctggaatggtgtggcaagacagagacgtatacctgcagggtcccatttgggccaaaattcctcacacagatggacactttcacccgtctcctcttatgggcggctttggacttaagcacccgcctcctcagatcctcatcaaaaacacgcctgttcctgcgaatcctccggcagagttttcggctacaaagtttgcttcattcatcacccagtattctactggccaagtcagcgtggagattgaatgggagctgcagaaagaaaacagcaaacgctggaatcccgaagtgcagtatacatctaactatgcaaaatctgccaacgttgatttcactgtggacaacaatggactttatactgagcctcgtcccattggcacccgttacctcacccgtcccctgtaa

SEQ ID NO: 5157 - protein, 736 aa, synthetic construct
MASDGYLPDWLEDNLSEGIREWWDLKPGAPKPKANQQKQDDGRGLVLPGYKYLGPFNGLDKGEPVNAADAAALEHDKAYDQQLRAGDNPYLRYNHADAEFQERLQEDTSFGGNLGRAVFQAKKRVLEPFGLVEEGAKTAPGKKRPVEQSPQEPDSSSGIGKTGQQPAKKRLNFGQTGDSESVPDPQPLGEPPATPAAVGPTTMASGGGAPMADNNEGADGVGNASGNWHCDSTWLGDRVITTSTRTWALPTYNNHLYKQISSASTGASNDNHYFGYSTPWGYFDFNRFHCHFSPRDWQRLINNNWGFRPKRLNFKLFNIQVKEVTTNDGVTTIANNLTSTVQVFSDSEYQLPYVLGSAHQGCLPPFPADVFMIPQYGYLTLNNGSQAVGRSSFYCLEYFPSQMLRTGNNFTFSYTFEDVPFHSSYAHSQSLDRLMNPLIDQYLYYLNRTQNQSGSAQNKDLLFSRGSPAGMSVQPKNWLPGPCYRQQRVSKTKTDNNNSNFTWTGASKYNLNGRESIINPGTAMASHKDDKDKFFPMSGVMIFGKESAGASNTALDNVMITDEEEIKATNPVATERFGTVAVNLQSSSTDPATGDVHVMGALPGMVWQDRDVYLQGPIWAKIPHTDGHFHPSPLMGGFGLKHPPPQILIKNTPVPANPPAEFSATKFASFITQYSTGQVSVEIEWELQKENSKRWNPEVQYTSNYAKSANVDFTVDNNGLYTEPRPIGTRYLTRPL

SEQ ID NO: 5158 - DNA, 2211 bp, synthetic construct
  source 1..2211: mol_type = other DNA
atggctgctgatggttatcttccagattggctcgaggacactctctctgaaggaataagacagtggtggaagctcaaacctggcccaccaccaccaaagcccgcagagcggcataaggacgacagcaggggtcttgtgcttcctgggtacaagtacctcggacccttcaacggactcgacaagggagagccggtcaacgaggcagacgcagcggccctcgagcacgacaaggcctacgaccagcagctcaaggccggtgacaacccctacctcaagtacaaccacgccgacgcggagttccagcagcggcttcagggcgacacatcgtttgggggcaacctcggcagagcagtcttccaggccaaaaagagggttcttgaacctcttggtctggttgagcaagcgggtgagacggctcctggaaagaagagaccgttgattgaatccccccagcagcccgactcctccacgggtatcggcaaaaaaggcaagcagccggctaaaaagagactcaattttggtcagactggcgactcagagtcagtccccgacccacaacctctcggagaacctccagcaacccccgctgctgtgggacctactacaatggcttcaggtggtggcgcaccaatggcagacaataacgaaggcgccgacggagtgggtaatgcctcaggaaattggcattgcgattccacatggctgggcgacagagtcatcaccaccagcacccgcacctgggccttgcccacctacaataaccacctctacaagcaaatctccagtgcttcaacgggggccagcaacgacaaccactacttcggctacagcaccccctgggggtattttgacttcaacagattccactgccacttttcaccacgtgactggcagcgactcatcaacaacaattggggattccggcccaagagactcaacttcaaactcttcaacatccaagtcaaggaggtcacgacgaatgatggcgtcacaaccatcgctaataaccttaccagcacggttcaagtcttctcggactcagactatcagctcccgtacgtgctcgggtcggctcacgagggctgcctcccgccgttcccagcagacgtcttcatggtgccacagtatggatacctcaccctgaacaacgggagtcaggcagtaggacgctcttcattttactgcctggagtactttccttctcagatgctgcgtaccggaaacaactttaccttcagctacacttttgaggacgttcctttccacagcagctacgctcacagccagagtctggaccgtctcatgaatcctctcatcgaccagtacctgtattacctgaacagaactcagaatcagtccggaagtgcccaaaacaaggacttgctgtttagccgggggtctccaactggcatgtctgttcagcccaaaaactggctacctggaccctgttatcggcagcagcgcgtttctaaaacaaaaacagacaacaacaacagcaactttacctggactggtgcttcaaaatataaccttaatgggcgtgaatctataatcaaccctggcactgctatggcctcacacaaagacgacaaagacaagttctttcccatgagcggtgtcatgatttttggaaaggagagcgccggagcttcaaacactgcattggacaatgtcatgatcacagacgaagaggaaatcaaagccactaaccccgtggccactgaaagatttgggactgtggcagtcaatctccagagcagcagcacagaccctgcgaccggagatgtgcatgccatgggagccttacctggaatggtgtggcaagacagagacgtatacctgcagggtcctatttgggccaaaattcctcacacggatggacactttcacccgtctcctctcatgggcggctttggactcaagaacccgcctcctcagatcctcatcaaaaacacgcctgttcctgcgaatcctccggcggagttttcagctacaaagtttgcttcattcatcacccagtattccacaggacaagtgagcgtggagattgaatgggagctgcagaaagaaaacagcaaacgctggaatcccgaagtgcagtatacatctaactatgcaaaatctgccaacgttgatttcactgtggacaacaatggactttatactgagcctcgccccattggcacccgttacctcacccgtcccctgtaa

SEQ ID NO: 5159 - protein, 736 aa, synthetic construct
MAADGYLPDWLEDTLSEGIRQWWKLKPGPPPPKPAERHKDDSRGLVLPGYKYLGPFNGLDKGEPVNEADAAALEHDKAYDQQLKAGDNPYLKYNHADAEFQQRLQGDTSFGGNLGRAVFQAKKRVLEPLGLVEQAGETAPGKKRPLIESPQQPDSSTGIGKKGKQPAKKRLNFGQTGDSESVPDPQPLGEPPATPAAVGPTTMASGGGAPMADNNEGADGVGNASGNWHCDSTWLGDRVITTSTRTWALPTYNNHLYKQISSASTGASNDNHYFGYSTPWGYFDFNRFHCHFSPRDWQRLINNNWGFRPKRLNFKLFNIQVKEVTTNDGVTTIANNLTSTVQVFSDSDYQLPYVLGSAHEGCLPPFPADVFMVPQYGYLTLNNGSQAVGRSSFYCLEYFPSQMLRTGNNFTFSYTFEDVPFHSSYAHSQSLDRLMNPLIDQYLYYLNRTQNQSGSAQNKDLLFSRGSPTGMSVQPKNWLPGPCYRQQRVSKTKTDNNNSNFTWTGASKYNLNGRESIINPGTAMASHKDDKDKFFPMSGVMIFGKESAGASNTALDNVMITDEEEIKATNPVATERFGTVAVNLQSSSTDPATGDVHAMGALPGMVWQDRDVYLQGPIWAKIPHTDGHFHPSPLMGGFGLKNPPPQILIKNTPVPANPPAEFSATKFASFITQYSTGQVSVEIEWELQKENSKRWNPEVQYTSNYAKSANVDFTVDNNGLYTEPRPIGTRYLTRPL

SEQ ID NO: 5160 - DNA, 2211 bp, synthetic construct
  source 1..2211: mol_type = other DNA
atggctgccgatggttatcttccagattggctcgaggacaacctctctgagggcattcgcgagtggtgggcgctgaaacctggagccccgaagcccaaagccaaccagcaaaagcaggacgacggccggggtctggtgcttcctggctacaagtacctcggacccttcaacggactcgacaagggggagcccgtcaacgcggcggatgcagcggccctcgagcacgacaaggcctacgaccagcagctcaaagcgggtgacaatccgtacctgcggtataaccacgccgacgccgagtttcaggagcgtctgcaagaagatacgtcttttgggggcaacctcgggcgagcagtcttccaggccaagaagcgggttctcgaacctctcggtctggttgaggaaggcgctaagacggctcctggaaagaaacgtccggtagagcaatcgccacaagagccagactcctcctcgggcatcggcaagacaggccagcagcccgctaaaaagagactcaattttggtcagactggcgactcagagtcagtccccgacccacaacctctcggagaacctccagcaacccccgctgctgtgggacctactacaatggcttcaggcggtggcgcaccaatggcagacaataacgaaggcgccgacggagtgggtaatgcctcaggaaattggcattgcgattccacatggctgggcgacagagtcatcaccaccagcacccgaacatgggccttgcccacctataacaaccacctctacaagcaaatctccagtgcttcgacgggggccagcaacgacaaccactacttcggctacagcaccccctgggggtattttgactttaacagattccactgccacttttcaccacgtgactggcagcgactcatcaacaacaactggggattccggcccaagagactcagcttcaagctcttcaacatccaggtcaaggaggtcacgacgaatgatggcgtcacaaccatcgctaataaccttaccagcacggttcaagtcttctcggactcggagtaccagcttccgtacgtcctcggctctgcgcaccagggctgcctccctccgttcccggcggacgtgttcatgattccgcaatacggctacctgacgctcaacaatggcagccaagccgtgggacgttcatccttttactgcctggaatatttcccttctcagatgctgagaacgggcaacaactttaccttcagctacacctttgaggaagtgcctttccacagcagctacgcgcacagccagagcctggaccggctgatgaatcctctcatcgatcaatacctgtattacctgaacagaactcaaaatcagtccggaagtgcccaaaacaaggacttgctgtttagccgtgggtctccagctggcatgtctgttcagcccaaaaactggctacctggaccctgttatcggcagcagcgcgtttctaaaacaaaaacagacaacaacaacagcaattttacctggactggtgcttcaaaatataacctcaatgggcgtgaatccatcatcaaccctggcactgctatggcctcacataaagacgacgaagacaagttctttcccatgagcggtgtcatgatttttggaaaagagagcgccggagcttcaaacactgcattggacaatgtcatgattacagacgaagaggaaattaaagccactaaccctgtggccaccgaaagatttgggaccgtggcagtcaatttccagagcagcagcacagaccctgcgaccggagatgtgcatgctatgggagcattacctggcatggtgtggcaagatagagacgtgtacctgcagggtcccatttgggccaaaattcctcacacagatggacactttcacccgtctcctcttatgggcggctttggactcaagaacccgcctcctcagatcctcatcaaaaacacgcctgttcctgcgaatcctccggcggagttttcagctacaaagtttgcttcattcatcacccaatactccacaggacaagtgagcgtggagattgaatgggagctgcagaaagaaaacagcaaacgctggaatcccgaagtgcagtatacatctaactatgcaaaatctgccaacattgatttcactgtggacaacaatggactttatactgagcctcgccccattggcacccgttacctcacccgtccccagtaa

SEQ ID NO: 5161 - protein, 736 aa, synthetic construct
MAADGYLPDWLEDNLSEGIREWWALKPGAPKPKANQQKQDDGRGLVLPGYKYLGPFNGLDKGEPVNAADAAALEHDKAYDQQLKAGDNPYLRYNHADAEFQERLQEDTSFGGNLGRAVFQAKKRVLEPLGLVEEGAKTAPGKKRPVEQSPQEPDSSSGIGKTGQQPAKKRLNFGQTGDSESVPDPQPLGEPPATPAAVGPTTMASGGGAPMADNNEGADGVGNASGNWHCDSTWLGDRVITTSTRTWALPTYNNHLYKQISSASTGASNDNHYFGYSTPWGYFDFNRFHCHFSPRDWQRLINNNWGFRPKRLSFKLFNIQVKEVTTNDGVTTIANNLTSTVQVFSDSEYQLPYVLGSAHQGCLPPFPADVFMIPQYGYLTLNNGSQAVGRSSFYCLEYFPSQMLRTGNNFTFSYTFEEVPFHSSYAHSQSLDRLMNPLIDQYLYYLNRTQNQSGSAQNKDLLFSRGSPAGMSVQPKNWLPGPCYRQQRVSKTKTDNNNSNFTWTGASKYNLNGRESIINPGTAMASHKDDEDKFFPMSGVMIFGKESAGASNTALDNVMITDEEEIKATNPVATERFGTVAVNFQSSSTDPATGDVHAMGALPGMVWQDRDVYLQGPIWAKIPHTDGHFHPSPLMGGFGLKNPPPQILIKNTPVPANPPAEFSATKFASFITQYSTGQVSVEIEWELQKENSKRWNPEVQYTSNYAKSANIDFTVDNNGLYTEPRPIGTRYLTRPQ

SEQ ID NO: 5162 - DNA, 2211 bp, synthetic construct
  source 1..2211: mol_type = other DNA
atggctgccgatggttatcttccagattggctcgaggacaacctctctgagggcattcgcgagtggtgggacttgaaacctggagccccgaaacccaaagccaaccagcaaaagcaggacgacggccggggtctggtgcttcctggctacaagtacctcggacccttcaacggactcgacaagggggagcccgtcaacgcggcggatgcagcggccctcgagcacgacaaggcctacgaccagcagctcaaagcgggtgacaatccgtaccttcggtataaccacgccgacgccgagtttcaggagcgtctgcaagaagatacgtcttttgggggcaacctcgggcgagcagtcttccaggccaaaaagagggttctcgaacctctcggtctggttgaggaagcggctaagacggctcctggaaagaaacgtccggtagagcagtcgccacaagagccagactcctcctcgggcattggcaagacaggccagcagcccgctaaaaagagactcaattttggtcagactggcgactcagagtcagtccccgacccacaacctctcggagaacctcccgcagccccctcaggtgtgggatctcttacaatggcttcaggtggtggcgcaccaatggcagacaataacgaaggcgccgacggagtgggtaatgcctcaggaaattggcattgcgattccacatggctgggcgacagagtcatcaccaccagcacccgcacctgggccttgcccacctacaataaccacctctacaagcaaatctccagtgcttcaacgggggccagcaacgacaaccactacttcggctacagcaccccctgggggtattttgacttcaacagattccactgccacttttcaccacgtgactggcaaagactcatcaacaacaattggggattccggcccaagagactcaacttcaagctcttcaacatccaagtcaaggaggtcacgacgaatgatggcgtcacgaccatcgctaataaccttaccagcacggttcaagtcttctcggactcggagtaccagttgccgtacgtcctcggctctgcgcaccagggctgcctccctccgttcccggcggacgtgttcatgattccgcagtacggctacctaacgctcaacaatggcagccaggcagtgggacggtcatccttttactgcctggaatatttcccatcgcagatgctgagaacgggcaacaactttaccttcagctacacctttgaggaagtgcctttccacagcagctacgcgcacagccagagcctggaccggctgatgaatcctctcatcgaccagtacctgtattacctgaacagaactcaaaatcagtccggaagtgcccaaaacaaggacttgctgtttagccgtgggtctccagctggcatgtctgttcagcccaaaaactggctacctggaccctgttaccggcagcagtgcgtttctaaaacaaaaacagacaacaacaacagcaactttacctggactggtgcttcaaaatataaccttaatgggcgtgaatctataatcaaccctggcactgctatggcctcacacaaagacgacaaagacaagttctttcccatgagcggtgtcatgatttttggaaaggagagcgccggagcttcaaacactgcattggacaatgtcatgatcacagacgaagaggaaatcaaagccactaaccccgtggccaccgaaagatttgggactgtggcagtcaatctccagagcagcagcacagaccctgcgaccggagatgtgcatgttatgggagccttacctggaatggtgtggcaagacagagacgtatacctgcagggtcctatttgggccaaaattcctcacacagatggacactttcacccgtctcctcttatgggcggctttggactcaagaacccgcctcctcagatcctcatcaaaaacacgcctgttcctgcgaatcctccggcggagttttcagctacaaagtttgcttcattcatcacccaatactccacaggacaagtgagcgtggagattgaatgggagctgcagaaagaaaacagcaagcgctggaatcccgaagtgcagtacacatccaattatgcaaaatctgccaacgttgatttcactgtggacaacaatggactttatactgagcctcgccccattggcacccgttacctcacccgtcccctgtaa

SEQ ID NO: 5163 - protein, 736 aa, synthetic construct
MAADGYLPDWLEDNLSEGIREWWDLKPGAPKPKANQQKQDDGRGLVLPGYKYLGPFNGLDKGEPVNAADAAALEHDKAYDQQLKAGDNPYLRYNHADAEFQERLQEDTSFGGNLGRAVFQAKKRVLEPLGLVEEAAKTAPGKKRPVEQSPQEPDSSSGIGKTGQQPAKKRLNFGQTGDSESVPDPQPLGEPPAAPSGVGSLTMASGGGAPMADNNEGADGVGNASGNWHCDSTWLGDRVITTSTRTWALPTYNNHLYKQISSASTGASNDNHYFGYSTPWGYFDFNRFHCHFSPRDWQRLINNNWGFRPKRLNFKLFNIQVKEVTTNDGVTTIANNLTSTVQVFSDSEYQLPYVLGSAHQGCLPPFPADVFMIPQYGYLTLNNGSQAVGRSSFYCLEYFPSQMLRTGNNFTFSYTFEEVPFHSSYAHSQSLDRLMNPLIDQYLYYLNRTQNQSGSAQNKDLLFSRGSPAGMSVQPKNWLPGPCYRQQCVSKTKTDNNNSNFTWTGASKYNLNGRESIINPGTAMASHKDDKDKFFPMSGVMIFGKESAGASNTALDNVMITDEEEIKATNPVATERFGTVAVNLQSSSTDPATGDVHVMGALPGMVWQDRDVYLQGPIWAKIPHTDGHFHPSPLMGGFGLKNPPPQILIKNTPVPANPPAEFSATKFASFITQYSTGQVSVEIEWELQKENSKRWNPEVQYTSNYAKSANVDFTVDNNGLYTEPRPIGTRYLTRPL

SEQ ID NO: 5164 - DNA, 2211 bp, synthetic construct
  source 1..2211: mol_type = other DNA
atggctgccgatggttatcttccagattggctcgaggacaacctctctgagggcattcgcgaatggtgggacttgaaacctggagccccgaaacccaaagtcaaccagcaaaagcaggacaacgctcggggtcttgtgcttccgggttacaaatacctcggacccttcaacggactcgacaagggggagcccgtcaacgcggcggacgcagcggccctcgagcacgacaaggcctacgaccagcagctcaaagcgggtgacaatccgtaccttcggtataaccacgccgacgccgagtttcaggagcgtctgcaagaagatacgtcttttgggggcaaccttggacgagcagtcttccaggccaagaagagggttctcgaaccttttggtctggttgaggaaggtgctaagacggctcctggaaagaaacgtccggtagagcagtcgccacaagagccagactcctcctcgggcattggcaagacaggccagcagcccgctaaaaagagactcaattttggtcagactggcgactcagagtcagtccccgacccacaacctctcggagaacctccagcaacccccgctgctgtgggacctactacaatggcttcaggcggtggcgcaccaatggcagacaataacgaaggcgccgacggagtgggtaatgcctcaggaaattggcattgcgattccacatggctgggcgacagagtcatcaccaccagcacccgcacctgggccttgcccacctacaataaccacctctacaagcaaatctccagtgcttcaacgggggccagcaacgacaaccactacttcggctacagcaccccctgggggtattttgacttcaacagattccactgccacttttcaccacgtgactggcaaagactcatcaacaacaattggggattccggcccaagagactcaacttcaagctcttcaacatccaagtcaaggaggtcacgacgaatgatggcgtcacgaccatcgctaataaccttaccagcacggttcaagtcttctcggactcggagtaccagttgccgtacgtcctcggctctgcgcaccagggctgcctccctccgttcccggcggacgtgttcatgattccgcaatacggctacctgacgctcaacaatggcagccaggcagtgggacggtcatccttttactgcctggaatatttcccatcgcagatgctgagaacgggcaataactttaccttcagctacacttttgaggacgttcctttccacagcagctacgctcacagccagagcctggaccggctgatgaatcctctcatcgaccagtacctgtattacctgaacagaactcagaatcagtccggaagtgcccaaaacaaggacttgctgtttagccgtgggtctccaactggcatgtctgttcagcccaaaaactggctacctggaccctgttatcggcagcagcgcgtttctaaaacaaaaacagacaacaacaacagcaactttacctggactggtgcttcaaaatataaccttaatgggcgtgaatctataatcaaccctggcactgctatggcctcacacaaagacgacgaagacaagttctttcccatgagcggtgtcatgatttttggaaaggagagcgccggagcttcaaacactgcattggacaatgtcatgatcacagacgaagaggaaatcaaagccactaaccccgtggccactgaaagatttgggactgtggcagtcaatctccagagcagcagcacagaccctgcgaccggagatgtgcatgccatgggagccttacctggaatggtgtggcaagacagagacgtatacctgcagggtcctatttgggccaaaattcctcacacggatggacactttcacccgtctcctctcatgggcggctttggacttaagcacccgcctcctcagatcctcatcaaaaacacgcctgttcctgcgaatcctccggcagagttttcggctacaaagtttgcttcattcatcacccagtattccacaggacaagtgagcgtggagattgaatgggagctgcagaaagaaaacagcaaacgctggaatcccgaagtgcagtatacatctaactatgcaaaatctgccaacgttgatttcactgtggacaacaatggactttatactgagcctcgccccattggcacccgttacctcacccgtcccctgtaa

SEQ ID NO: 5165 - protein, 736 aa, synthetic construct
MAADGYLPDWLEDNLSEGIREWWDLKPGAPKPKVNQQKQDNARGLVLPGYKYLGPFNGLDKGEPVNAADAAALEHDKAYDQQLKAGDNPYLRYNHADAEFQERLQEDTSFGGNLGRAVFQAKKRVLEPFGLVEEGAKTAPGKKRPVEQSPQEPDSSSGIGKTGQQPAKKRLNFGQTGDSESVPDPQPLGEPPATPAAVGPTTMASGGGAPMADNNEGADGVGNASGNWHCDSTWLGDRVITTSTRTWALPTYNNHLYKQISSASTGASNDNHYFGYSTPWGYFDFNRFHCHFSPRDWQRLINNNWGFRPKRLNFKLFNIQVKEVTTNDGVTTIANNLTSTVQVFSDSEYQLPYVLGSAHQGCLPPFPADVFMIPQYGYLTLNNGSQAVGRSSFYCLEYFPSQMLRTGNNFTFSYTFEDVPFHSSYAHSQSLDRLMNPLIDQYLYYLNRTQNQSGSAQNKDLLFSRGSPTGMSVQPKNWLPGPCYRQQRVSKTKTDNNNSNFTWTGASKYNLNGRESIINPGTAMASHKDDEDKFFPMSGVMIFGKESAGASNTALDNVMITDEEEIKATNPVATERFGTVAVNLQSSSTDPATGDVHAMGALPGMVWQDRDVYLQGPIWAKIPHTDGHFHPSPLMGGFGLKHPPPQILIKNTPVPANPPAEFSATKFASFITQYSTGQVSVEIEWELQKENSKRWNPEVQYTSNYAKSANVDFTVDNNGLYTEPRPIGTRYLTRPL

SEQ ID NO: 5166 - DNA, 2208 bp, synthetic construct
  source 1..2208: mol_type = other DNA
atggctgccgatggttatcttccagattggctcgaggacaacctctctgagggcattcgcgaatggtgggacttgaaacctggagccccgaaacccaaagtcaaccagcaaaagcaggacaacgctcggggtcttgtgcttccgggttacaaatacctcggacccttcaacggactcgacaagggggagcccgtcaacgcggcggacgcagcggccctcgagcacgacaaggcctacgaccagcagctcaaagcgggtgacaatccgtaccttcggtataaccacgccgacgccgagtttcaggagcgtctgcaagaagatacgtcttttgggggcaaccttggacgagcagtcttccaggccaagaagagggttctcgaaccttttggtctggttgaggaaggtgctaagacggctcctggaaagaaacgtccggtagagcagtcgccacaagagccagactcctcctcgggcattggcaagacaggccagcagcccgctaaaaagagactcaattttggtcagactggcgactcagagtcagtccccgacccacaacctctcggagaacctccagcaacccccgctgctgtgggacctactacaatggcttcaggcggtggcgcaccaatggcagacaataacgaaggcgccgacggagtgggtaatgcctcaggaaattggcattgcgattccacatggctgggcgacagagtcatcaccaccagcacccgaacatgggccttgcccacctataacaaccacctctacaagcaaatctccagtgcttcaacgggggccagcaacgacaaccactacttcggctacagcaccccctgggggtattttgatttcaacagattccactgccacttttcaccacgtgactggcagcgactcatcaataacaattggggattccggcccaagagactcaacttcaaactcttcaacntccaagtcaaggaggnnacgacgaangatgncgtcacaaccatcgctaataaccttaccagcacggttcaagtcttctcggactcggagtaccagcttccgtacgtcctcggctctgcgcaccagggctgcctccctccgttcccggcggacgtgttcatgattccgcaatacggctacctgacgctcaacaatggcagccaggcagtgggacggtcatccttttactgcctggaatatttcccatcgcagatgctgagaacgggcaataactttacctncagctacacttttgaggacgttcctttccacagcagctacgctcacagccagagcctggaccggctgatgaatcctctcatcgaccagtacctgtattacctgaacagaactcagaatcagtccggaagtgcccaaaacaaggacttgctgtttagccgtgggtctccaactggcatgtctgttcagcccaaaaactggctacctggaccctgttatcggcagcagcgcgtttctaaaacaaaaacagacaacaacaacagcaactttacctggactggtgcttcaaaatataaccttaatgggcgtgaatctataatcaaccctggcactgctatggcctcacacaaagacgacgaagacaagttctttcccatgagcggtgtcatgatttttggaaaggagagcgccggagcttcaaacactgcattggacaatgtcatgatcacagacgaagagannncnaagccactaaccccgtggccactgaaagatttgggactgtggcagtcaatctccaagcagcacannnaccctgcgaccgnagatgtgcatgccatgggagccttacctggaatggtgtggcaagacagagacgtatacctgcagggtcctatttgggccaaaattcctcacacggatggacactttcacccgtctcctctcatgggcggctttggacttaagcacccgcctcctcagatcctcatcaaaaacacgcctgttcctgcgaatcctccggcagagttttcggctacaaagtttgcttcattcatcacccagtattccacaggacaagtgagcgtggagattgaatgggagctgcagaaagaaaacagcaaacgctggaatcccgaagtgcagtatacatctaactatgcaaaatctgccaacgttgatttcactgtggacaacaatggactttatactgagcctcgccccattggcacccgttacctcacccgtccccngtaa

SEQ ID NO: 5167 - protein, 723 aa, synthetic construct
MAADGYLPDWLEDNLSEGIREWWDLKPGAPKPKVNQQKQDNARGLVLPGYKYLGPFNGLDKGEPVNAADAAALEHDKAYDQQLKAGDNPYLRYNHADAEFQERLQEDTSFGGNLGRAVFQAKKRVLEPFGLVEEGAKTAPGKKRPVEQSPQEPDSSSGIGKTGQQPAKKRLNFGQTGDSESVPDPQPLGEPPATPAAVGPTTMASGGGAPMADNNEGADGVGNASGNWHCDSTWLGDRVITTSTRTWALPTYNNHLYKQISSASTGASNDNHYFGYSTPWGYFDFNRFHCHFSPRDWQRLINNNWGFRPKRLNFKLFNQVKETTDVTTIANNLTSTVQVFSDSEYQLPYVLGSAHQGCLPPFPADVFMIPQYGYLTLNNGSQAVGRSSFYCLEYFPSQMLRTGNNFTSYTFEDVPFHSSYAHSQSLDRLMNPLIDQYLYYLNRTQNQSGSAQNKDLLFSRGSPTGMSVQPKNWLPGPCYRQQRVSKTKTDNNNSNFTWTGASKYNLNGRESIINPGTAMASHKDDEDKFFPMSGVMIFGKESAGASNTALDNVMITDEEATNPVATERFGTVAVNLQSSPATDVHAMGALPGMVWQDRDVYLQGPIWAKIPHTDGHFHPSPLMGGFGLKHPPPQILIKNTPVPANPPAEFSATKFASFITQYSTGQVSVEIEWELQKENSKRWNPEVQYTSNYAKSANVDFTVDNNGLYTEPRPIGTRYLTRP

SEQ ID NO: 5168 - DNA, 2208 bp, synthetic construct
  source 1..2208: mol_type = other DNA
atggctgccgatggttatcttccagattggctcgaggacactctctctgaaggaataagacagtggtggaagctcaaacctggcccaccaccaccaaagcccgcagagcggcataaggacgacagcaggggtcttgtgcttcctgggtacaagtacctcggacccttcaacggactcgacaagggagagccggtcaacgaggcagacgccgcggccctcgagcacgacaaagcctatgaccggcagctcgacagcggagacaacccgtacctcaagtacaaccacgccgacgcggagtttcaggagcgccttaaagaagatacgtcttttgggggcaacctcggacgagcagtcttccaggcgaaaaagagggttcttgaacctctgggcctggttgaggaacctgttaagacggctccgggaaaaaagaggccggtagagcactctcctgtggagccagactcctcctcgggaaccggaaaggcgggtcagcagcctgcaagaaaaagattgaattttggtcagactggagacgcagactcagtacctgacccccagcctctcggacagccaccagcagccccctctggtctgggaactaatacgatggctacaggcagtggcgcaccaatggcagacaataacgagggcgccgacggagtgggtaattcctcgggaaattggcattgcgattccacatggatgggcgacagagtcatcaccaccagcacccgaacctgggccctgcccacctacaacaaccacctctacaaacaaatttccagccaatcaggagcctcgaacgacaatcactactttggctacagcaccccttgggggtattttgacttcaacagattccactgccacttttcaccacgtgactggcaaagactcatcaacaacaactggggattccgacccaagagactcaagttcaagctctttaacattcaagtcaaagaggtcacgcagaatgacggtacgacgacgattgccaataaccttaccagcacggttcaggtgtttactgactcggagtaccagctcccgtacgtcctcggctcggcgcatcaaggatgcctcccgccgttcccagcagacgtcttcatggtgccacagtatggatacctcaccctgaacaacgggagtcaggcagtaggacgctcttcattttactgcctggagtactttccttctcagatgctgcgtaccggtaacaactttaccttcagctacacttttgaggacgttcctttccacagcagctacgctcacagccagagtctggaccgtctcatgaatcctctcatcgaccagtacctgtattacttgagcagaacagacgctccaagtggaaccaccacgcagtcaaggcttcagttttctcaggccggagcgagtgacattcgggaccagtctaggaactggcttcctggaccctgttaccgccagcagcgagtatcaaagacatctgcggataacaacaacagtgaatactcgtggactggagctaccaagtaccacctcaatggcagagactctctggtgaatccgggcccggccatggcaagccacaaggacgatgaagaaaagttttttcctcagagcggggttctcatctttgggaagcaaggctcagagaaaacaagtgtggacattgaaaaggtcatgattacagacgaagaggaaatcaggacaaccaatcccgtggctacggagcagtatggttctgtatctaccaacctccagagaggcaacagacaagcagctaccgcagatgtcaacacacaaggcgttcttccaggcatggtctggcaggacagagatgtgtaccttcaggggcccatctgggcaaagattccacacacggacggacattttcacccctctcccctcatgggtggattcggacttaaacaccctcctccacagattctcatcaagaacaccccggtacctgcgaatccttcgaccaccttcagtgcggcaaagtttgcttccttcatcacacagtactccacgggacaggtcagcgtggagatcgagtgggagctgcagaaggaaaacagcaaacgctggaatcccgaagttcagtacacttccaactacaacaagtctgttaatgtggactttactgtggacactaatggcgtgtattcagagcctcgccccattggcaccagatacctgactcgtaatctgtaa

SEQ ID NO: 5169 - protein, 735 aa, synthetic construct
MAADGYLPDWLEDTLSEGIRQWWKLKPGPPPPKPAERHKDDSRGLVLPGYKYLGPFNGLDKGEPVNEADAAALEHDKAYDRQLDSGDNPYLKYNHADAEFQERLKEDTSFGGNLGRAVFQAKKRVLEPLGLVEEPVKTAPGKKRPVEHSPVEPDSSSGTGKAGQQPARKRLNFGQTGDADSVPDPQPLGQPPAAPSGLGTNTMATGSGAPMADNNEGADGVGNSSGNWHCDSTWMGDRVITTSTRTWALPTYNNHLYKQISSQSGASNDNHYFGYSTPWGYFDFNRFHCHFSPRDWQRLINNNWGFRPKRLKFKLFNIQVKEVTQNDGTTTIANNLTSTVQVFTDSEYQLPYVLGSAHQGCLPPFPADVFMVPQYGYLTLNNGSQAVGRSSFYCLEYFPSQMLRTGNNFTFSYTFEDVPFHSSYAHSQSLDRLMNPLIDQYLYYLSRTDAPSGTTTQSRLQFSQAGASDIRDQSRNWLPGPCYRQQRVSKTSADNNNSEYSWTGATKYHLNGRDSLVNPGPAMASHKDDEEKFFPQSGVLIFGKQGSEKTSVDIEKVMITDEEEIRTTNPVATEQYGSVSTNLQRGNRQAATADVNTQGVLPGMVWQDRDVYLQGPIWAKIPHTDGHFHPSPLMGGFGLKHPPPQILIKNTPVPANPSTTFSAAKFASFITQYSTGQVSVEIEWELQKENSKRWNPEVQYTSNYNKSVNVDFTVDTNGVYSEPRPIGTRYLTRNL

SEQ ID NO: 5170 - DNA, 2208 bp, synthetic construct
  source 1..2208: mol_type = other DNA
atggctgccgatggttatcttccagattggctcgaggacactctctctgaaggaataagacagtggtggaagctcaaacctggcccaccaccaccaaagcccgcagagcggcataaggacgacagcaggggtcttgtgcttcctgggtacaagtacctcggacccttcaacggactcgacaagggagagccggtcaacgaggcagacgccgcggccctcgagcacgacaaagcctatgaccggcagctcgacagcggagacaacccgtacctcaagtacaaccacgccgacgcggagtttcaggagcgccttaaagaagatacgtcttttgggggcaacctcggacgagcagtcttccaggcgaaaaagagggttcttgaacctctgggcctggttgaggaacctgttaagacggctccgggaaaaaagaggccggtagagcactctcctgtggagccagactcctcctcgggaaccggaaaggcgggccagcagcctgcaagaaaaagattgaattttggtcagactggagacgcaaactcagtacctgacccccagcctctcggacagccaccagcagccccctctggtctgggaactaatacgatggctacaggcagtggcgcaccaatggcagacaataacgagggcgccgacggagtgggtaattcctcgggaaattggcattgcgattccacatggatgggcgacagagtcatcaccaccagcacccgaacctgggccctgcccacctacaacaaccacctctacaaacaaatttccagccaatcaggagcctcgaacgacaatcactactttggctacagcaccccttgggggtattttgacttcaacagattccactgccacttttcaccacgtgactggcaaagactcatcaacaacaactggggattccgacccaagagactcaagttcaagctctttaacattcaagtcaaagaggtcacgcagaatgacggtacgacgacgattgccaataaccttaccagcacggttcaggtgtttactgactcggagtaccagctcccgtacgtcctcggctcggcgcatcaaggatgcctcccgccgttcccagcagacgtcttcatggtgccacagtatggatacctcaccctgaacaacgggagtcgggcagtaggacgctcttcattttactgcctggagtactttccttctcagatgctgcgtaccggtaacaactttaccttcagctacacttttgaggacgttcctttccacagcagctacgctcacagccagagtctggaccgtctcatgaatcctctcatcgaccagtacctgtattacttgagcagaacagacactccaagtggaaccaccacgcagtcaaggcttcagttttctcaggccggagcgagtgacattcgggaccagtctaggaactggcttcctggaccctgttaccgccagcagcgagtatcaaagacatctgcggataacaacaacagtgaatactcgtggactggagctaccaagtaccacctcaatggcagagactctctggtgaatccgggcccggccatggcaagccacaaggacgatgaagaaaagttttttcctcagagcggggttctcatctttgggaagcaaggctcagagaaaacaagtgtggacattgaaaaggtcatgattacagacgaagaggaaatcaggacgaccaatcccgtggctacggagcagtatggttctgtatctaccaacctccagagaggcaacagacaagcagctaccgcagatgtcaacacacaaggcgttcttccaggcatggtctggcaggacagagatgtgtaccttcaggggcccatctgggcaaagattccacacacggacggacattttcacccctctcccctcatgggtggattcggacttaaacaccctcctccacagattctcatcaagaacaccccggtacctgcgaatccttcgaccaccttcagtgcggcaaagtttgcttccttcatcacacagtactccacgggacaggtcagcgtggagatcgagtgggagctgcagaaggaaaacagcaaacgctggaatcccgaagttcagtacacttccaactacaacaagtctgttaatgtggactttactgtggacactaatggcgtgtatacagagcctcgccccattggcaccagatacctgactcgtaatctgtaa

SEQ ID NO: 5171 - protein, 735 aa, synthetic construct
MAADGYLPDWLEDTLSEGIRQWWKLKPGPPPPKPAERHKDDSRGLVLPGYKYLGPFNGLDKGEPVNEADAAALEHDKAYDRQLDSGDNPYLKYNHADAEFQERLKEDTSFGGNLGRAVFQAKKRVLEPLGLVEEPVKTAPGKKRPVEHSPVEPDSSSGTGKAGQQPARKRLNFGQTGDANSVPDPQPLGQPPAAPSGLGTNTMATGSGAPMADNNEGADGVGNSSGNWHCDSTWMGDRVITTSTRTWALPTYNNHLYKQISSQSGASNDNHYFGYSTPWGYFDFNRFHCHFSPRDWQRLINNNWGFRPKRLKFKLFNIQVKEVTQNDGTTTIANNLTSTVQVFTDSEYQLPYVLGSAHQGCLPPFPADVFMVPQYGYLTLNNGSRAVGRSSFYCLEYFPSQMLRTGNNFTFSYTFEDVPFHSSYAHSQSLDRLMNPLIDQYLYYLSRTDTPSGTTTQSRLQFSQAGASDIRDQSRNWLPGPCYRQQRVSKTSADNNNSEYSWTGATKYHLNGRDSLVNPGPAMASHKDDEEKFFPQSGVLIFGKQGSEKTSVDIEKVMITDEEEIRTTNPVATEQYGSVSTNLQRGNRQAATADVNTQGVLPGMVWQDRDVYLQGPIWAKIPHTDGHFHPSPLMGGFGLKHPPPQILIKNTPVPANPSTTFSAAKFASFITQYSTGQVSVEIEWELQKENSKRWNPEVQYTSNYNKSVNVDFTVDTNGVYTEPRPIGTRYLTRNL

SEQ ID NO: 5172 - DNA, 2211 bp, synthetic construct
  source 1..2211: mol_type = other DNA
atggctgccgatggttatcttccagattggctcgaggacactctctctgaaggaataagacagtggtggaagctcaaacctggcccaccaccaccaaagcccgcagagcggcataaggacgacagcaggggtcttgtgcttcctgggtacaagtacctcggacccttcaacggactcgacaagggagagccggtcaacgaggcagacgccgcggccctcgagcacgacaaggcctacgaccagcagctcaaagcgggtgacaatccgtacctgcggtataaccacgccgacgccgagtttcaggagcgtctgcaagaagatacgtcttttgggggcaacctcgggcgagcagtcttccaggccaagaagcgggttctcgaacctctcggtctggttgaggaaggcgctaagacggctcctggaaagaaacgtccggtagagcagtcgccacaagagccagactcctcctcgggcatcggcaagacaggccagcagcccgctaaaaagagactcaattttggtcagactggcgactcagagtcagtccccgacccacaacctctcggagaacctccagcaacccccgctgctgtgggacctactacaatggcttcaggcggtggcgcaccaatggcagacaataacgaaggcgccgacggagtgggtaatgcctcaggaaattggcattgcgattccacatggctgggcgacagagtcatcaccaccagcacccgaacatgggccttgcccacctataacaaccacctctacaagcaaatctccagtgcttcgacgggggccagcaacgacaaccactacttcggctacagcaccccctgggggtattttgactttaacagattccactgccacttttcaccacgtgactggcagcgactcatcaacaataactggggattccggcccaagagactcagcttcaagctcttcaacatccaggtcaaggaggtcacgacgaatgatggcgtcacaaccatcgctaataaccttaccagcacggttcaagtcttctcggactcggagtaccagcttccgtacgtcctcggctctgcgcaccagggctgcctccctccgttcccggcggacgtgttcatgattccgcaatacggctacctgacgctcaacaatggcagccaagccgtgggacgttcatccttttactgcctggaatatttcccttctcagatgctgagaacgggcaacaactttaccttcagctacacctttgaggaagtgcctttccacagcagctacgcgcacagccagagcctggaccggctgatgaatcctctcatcgatcaatacctgtattacctgaacagaactcaaaatcagtccggaagtgcccaaaacaaggacttgctgtttagccgtgggtctccagctggcatgtctgttcagcccaaaaactggctacctggaccctgttatcggcagcagcgcgtttctaaaacaaaaacagacaacaacaacagcaattttacctggactggtgcttcaaaatataacctcaatgggcgtgaatccatcatcaaccctggcactgctatggcctcacacaaagacgacgaagacaagttctttcccatgagcggtgtcatgatttttggaaaagagagcgccggagcttcaaacactgcattggacaatgtcatgattacggacgaagaggaaattaaagccactaaccctgtggccaccgaaagatttgggaccgtggcagtcaatttccagagcagcagcacagaccctgcgaccggagatgtgcatgctatgggagcattacctggcatggtgtggcaagatagagacgtgtacctgcagggtcccatttgggccaaaattcctcacacagatggacactttcacccgtctcctcttatgggcggctttggactcaagaacccgcctcctcagatcctcatcaaaaacacgcctgttcctgcgaatcctccggcggagttttcagctacaaagtttgcttcattcatcactcaatactccacaggacaagtgagcgtggaaattgaatgggagctgcagaaagaaaacagcaaacgctggaatcccgaagtgcagtatacatctaactatgcaaaatctgccaacgttgatttcactgtggacaacaatggactttatactgagcctcgccccattggcacccgttacctcacccgtcccctgtaa

SEQ ID NO: 5173 - protein, 736 aa, synthetic construct
MAADGYLPDWLEDTLSEGIRQWWKLKPGPPPPKPAERHKDDSRGLVLPGYKYLGPFNGLDKGEPVNEADAAALEHDKAYDQQLKAGDNPYLRYNHADAEFQERLQEDTSFGGNLGRAVFQAKKRVLEPLGLVEEGAKTAPGKKRPVEQSPQEPDSSSGIGKTGQQPAKKRLNFGQTGDSESVPDPQPLGEPPATPAAVGPTTMASGGGAPMADNNEGADGVGNASGNWHCDSTWLGDRVITTSTRTWALPTYNNHLYKQISSASTGASNDNHYFGYSTPWGYFDFNRFHCHFSPRDWQRLINNNWGFRPKRLSFKLFNIQVKEVTTNDGVTTIANNLTSTVQVFSDSEYQLPYVLGSAHQGCLPPFPADVFMIPQYGYLTLNNGSQAVGRSSFYCLEYFPSQMLRTGNNFTFSYTFEEVPFHSSYAHSQSLDRLMNPLIDQYLYYLNRTQNQSGSAQNKDLLFSRGSPAGMSVQPKNWLPGPCYRQQRVSKTKTDNNNSNFTWTGASKYNLNGRESIINPGTAMASHKDDEDKFFPMSGVMIFGKESAGASNTALDNVMITDEEEIKATNPVATERFGTVAVNFQSSSTDPATGDVHAMGALPGMVWQDRDVYLQGPIWAKIPHTDGHFHPSPLMGGFGLKNPPPQILIKNTPVPANPPAEFSATKFASFITQYSTGQVSVEIEWELQKENSKRWNPEVQYTSNYAKSANVDFTVDNNGLYTEPRPIGTRYLTRPL

SEQ ID NO: 5174 - protein, 735 aa, synthetic construct
MAADGYLPDWLEDTLSEGIRQWWKLKPGPPPPKPAERHKDDSRGLVLPGYKYLGPFNGLDKGEPVNEADAAALEHDKAYDRQLDSGDNPYLKYNHADAEFQERLKEDTSFGGNLGRAVFQAKKRVLEPLGLVEEPVKTAPGKKRPVEHSPVEPDSSSGTGKAGQQPARKRLNFGQTGDADSVPDPQPLGQPPAAPSGLGTNTMATGSGAPMADNNEGADGVGNSSGNWHCDSTWMGDRVITTSTRTWALPTYNNHLYKQISSQSGASNDNHYFGYSTPWGYFDFNRFHCHFSPRDWQRLINNNWGFRPKRLKFKLFNIQVKEVTQNDGTTTIANNLTSTVQVFTDSEYQLPYVLGSAHQGCLPPFPADVFMVPQYGYLTLNNGSQAVGRSSFYCLEYFPSQMLRTGNNFTFSYTFEDVPFHSSYAHSQSLDRLMNPLIDQYLYYLSRTDTPSGTTTQSRLQFSQAGASDIRNQSRNWLPGPCYRQQRVSKTSADNNNSEYSWTGATKYHLNGRDSLVNPGPAMASHKDDEEKFFPQSGVLIFGKQGSEKTSVDIEKVMITDEEEIRTTNPVATEQYGSVSTNLQRGNRQAATADVNTQGVLPGMVWQDRDVYLQGPIWAKIPHTDGHFHPSPLMGGFGLKHPPPQILIKNTPVPANPSTTFSAAKFASFITQYSTGQVSVEIEWELQKENSKRWNPEVQYTSNYNKSVNVDFTVDTNGVYSEPRPIGTRYLTRNQ

SEQ ID NO: 5175 - DNA, 2208 bp, synthetic construct
  source 1..2208: mol_type = other DNA
atggctgccgatggttatcttccagattggctcgaggacactctctctgaaggaataagacagtggtggaagctcaaacctggcccaccaccaccaaagcccgcagagcggcataaggacgacagcaggggtcttgtgcttcctgggtacaagtacctcggacccttcaacggactcgacaagggagagccggtcaacgaggcagacgccgcggccctcgagcacgacaaagcctatgaccggcagctcgacagcggagacaacccgtacctcaagtacaaccacgccgacgcggagtttcaggaacgccttaaagaagatacgtcttttgggggcaacctcggacgagcagtcttccaggcgaaaaagagggttcttgaacctctgggcctggttgaggaacctgttaagacggctccgggaaaaaagaggccggtagagcactctcctgtggagccagactcctcctcgggaaccggaaaggcgggccagcagcctgcaagaaaaagattgaattttggtcagactggagacgcagactcagtacctgacccccagcctctcggacagccaccagcagccccctctggtctgggaactaatacgatggctacaggcagtggcgcaccaatggcagacaataacgagggcgccgacggagtgggtaattcctcgggaaattggcattgcgattccacatggatgggcgacagagtcatcaccaccagcacccgaacctgggccctgcccacctacaacaaccacctctacaaacaaatttccagccaatcaggagcctcgaacgacaatcactactttggctacagcaccccttgggggtattttgacttcaacagattccactgccacttttcaccacgtgactggcaaagactcatcaacaacaactggggattccgacccaagagactcaagttcaagctctttaacattcaagtcaaagaggtcacgcagaatgacggtacgacgacgattgccaataaccttaccagcacggttcaggtgtttactgactcggagtaccagctcccgtacgtcctcggctcggcgcatcaaggatgcctcccgccgttcccagcagacgtcttcatggtgccacagtatggatacctcaccctgaacaacgggagtcaggcagtaggacgctcttcattttactgcctggagtactttccttctcagatgctgcgtaccggtaacaactttaccttcagctacacttttgaggacgttcctttccacagcagctacgctcacagccagagtctggaccgtctcatgaatcctctcatcgaccagtacctgtattacttgagcagaacagacactccaagtggaaccaccacgcagtcaaggcttcagttttctcaggccggagcgagtgacattcggaaccagtctaggaactggcttcctggaccctgttaccgccagcagcgagtatcaaagacatctgcggataacaacaacagtgaatactcgtggactggagctaccaagtaccacctcaatggcagagactctctggtgaatccgggcccggccatggcaagccacaaggacgatgaagaaaagttttttcctcagagcggggttctcatctttgggaagcaaggctcagagaaaacaagtgtggacattgaaaaggtcatgattacagacgaagaggaaatcaggacaaccaatcccgtggctacggagcagtatggttctgtatctaccaacctccagagaggcaacagacaagcagctaccgcagatgtcaacacacaaggcgttcttccaggcatggtctggcaggacagagatgtgtaccttcaggggcccatctgggcaaagattccacacacggacggacattttcacccctctcccctcatgggtggattcggacttaaacaccctcctccacagattctcatcaagaacaccccggtacctgcgaatccttcgaccaccttcagtgcggcaaagtttgcttccttcatcacacagtactccacgggacaggtcagcgtggagatcgagtgggagctgcagaaggaaaacagcaaacgctggaatcccgaagttcagtacacttccaactacaacaagtctgttaatgtggactttactgtggacactaatggcgtgtattcagagcctcgccccattggcaccagatacctgactcgtaatcagtaa

SEQ ID NO: 5176 - DNA, 2208 bp, synthetic construct
  source 1..2208: mol_type = other DNA
atggctgccgatggttatcttccagattggctcgaggacactctctctgaaggaataagacagtggtggaagctcaaacctggcccaccaccaccaaagcccgcagagcggcataaggacgacagcaggggtcttgtgcttcctgggtacaagtacctcggacccttcaacggactcgacaagggagagccggtcaacgaggcagacgccgcggccctcgagcacgacaaagcctatgaccggcagctcgacagcggagacaacccgtacctcaagtacaaccacgccgacgcggagtttcaggagcgccttaaagaagatacgtcttttgggggcaacctcggacgagcagtcttccaggcgaaaaagagggttcttgaacctctgggcctggttgaggaacctgttaagacggctccgggaaaaaagaggccggtagagcactctcctgtggagccagactcctcctcgggaaccggaaaggcgggccagcagcctgcaagaaaaagattgaattttggtcagactggagacgcagactcagtacctgatccccagcctctcggacagccaccagcagccccctctggtctgggaactaatacgatggctacaggcagtggcgcaccaatggcagacaataacgagggcgccgacggagtgggtaattcctcgggaaattggcattgcgattccacatggatgggcgacagagtcatcaccaccagcacccgaacctgggccctgcccacctacaacaaccacctctacaaacaaatttccagccaatcaggagcctcgaacgacaatcactactttggctacagcaccccttgggggtattttgacttcaacagattccactgccacttttcaccacgtgactggcaaagactcatcaacaacaactggggattccgacccaagagactcaagttcaagctctttaacattcaagtcaaagaggtcacgcagaatgacggtacgacgacgattgccaataaccttaccagcacggttcaggtgtttactgactcggagtaccagctcccgtatgtcctcggctcggcgcatcaaggatgcctcccgccgttcccagcagacgtcttcatggtgccacagtatggatacctcaccctgaacaacgggagtcaggcagtaggacgctcttcattttactgcctggagtactttccttctcagatgctgcgtaccggtaacaactttaccttcagctacacttttgaggacgttcctttccacagcagctacgctcacagccagagtctggaccgtctcatgaatcctctcatcgaccagtacctgtattacttgagcagaacagacactccaagtggaaccaccacgcagtcaaggcttcagttttctcaggccggagcgagtgacattcgggaccagtctaggaactggcttcctggaccctgttaccgccagcagcgagtatcaaagacatctgcggataacaacaacagtgaatactcgtggactggagctaccaagtaccacctcaatggcagagactctctggtgaatccgggcccggccatggcaagccacaaggacgatgaagaaaagttttttcctcagagcggggttctcatctttgggaagcaaggctcagagaaaacaagtgtggacattgaaaaggtcatgattacagacgaagaggaaatcaggacaaccaatcccgtggctacggagcagtatggttctgtatctaccaacctccagagaggcaacagacaagcagctaccgcagatgtcaacacacaaggcgttcttccaggcatggtctggcaggacagagatgtgtaccttcaggggcccatctgggcaaagattccacacacggacggacattttcacccctctcccctcatgggtggattcggacttaaacaccctcctccacagattctcatcaagaacaccccggtacctgcgaatccttcgaccaccttcagtgcggcaaagtttgcttccttcatcacacagtactccacgggacaggtcagcgtggagatcgagtgggagctgcagaaggaaaacagcaaacgctggaatcccgaagttcagtacacttccaactacaacaagtctgttaatgtggactttactgtggacactaatggcgtgtattcagagcctcgccccattggcaccagatacctgactcgtaatctgtaa

SEQ ID NO: 5177 - protein, 735 aa, synthetic construct
MAADGYLPDWLEDTLSEGIRQWWKLKPGPPPPKPAERHKDDSRGLVLPGYKYLGPFNGLDKGEPVNEADAAALEHDKAYDRQLDSGDNPYLKYNHADAEFQERLKEDTSFGGNLGRAVFQAKKRVLEPLGLVEEPVKTAPGKKRPVEHSPVEPDSSSGTGKAGQQPARKRLNFGQTGDADSVPDPQPLGQPPAAPSGLGTNTMATGSGAPMADNNEGADGVGNSSGNWHCDSTWMGDRVITTSTRTWALPTYNNHLYKQISSQSGASNDNHYFGYSTPWGYFDFNRFHCHFSPRDWQRLINNNWGFRPKRLKFKLFNIQVKEVTQNDGTTTIANNLTSTVQVFTDSEYQLPYVLGSAHQGCLPPFPADVFMVPQYGYLTLNNGSQAVGRSSFYCLEYFPSQMLRTGNNFTFSYTFEDVPFHSSYAHSQSLDRLMNPLIDQYLYYLSRTDTPSGTTTQSRLQFSQAGASDIRDQSRNWLPGPCYRQQRVSKTSADNNNSEYSWTGATKYHLNGRDSLVNPGPAMASHKDDEEKFFPQSGVLIFGKQGSEKTSVDIEKVMITDEEEIRTTNPVATEQYGSVSTNLQRGNRQAATADVNTQGVLPGMVWQDRDVYLQGPIWAKIPHTDGHFHPSPLMGGFGLKHPPPQILIKNTPVPANPSTTFSAAKFASFITQYSTGQVSVEIEWELQKENSKRWNPEVQYTSNYNKSVNVDFTVDTNGVYSEPRPIGTRYLTRNL

SEQ ID NO: 5178 - DNA, 2172 bp, synthetic construct
  source 1..2172: mol_type = other DNA
atgtcttttgttgatcaccctccagattggttggaagaagttggtgaaggtcttcgcgagtttttgggccttgaagcgggcccaccgaaaccaaaacccaatcagcagcatcaagatcaagcccgtggtcttgtgctgcctggttataactatctcggacccggaaacggtctcgatcgaggagagcctgtcaacagggcagacgaggtcgcgcgagagcacgacatctcgtacaacgagcagcttgaggcgggagacaacccctacctcaagtacaaccacgcggacgccgagtttcaggagaagctcgccgacgacacatccttcgggggaaacctcggaaaggcagtctttcaggccaagaaaagggttctcgaaccttttggcctggttgaagagggtgctaagacggcccctaccggaaagcggatagacgaccactttccaaaaagaaagaaggctcggaccgaagaggactccaagccttccacctcgtcagacgccgaagctggacccagcggatcccagcagctgcaaatcccagcccaaccagcctcaagtttgggagctgatacaatgtctgcgggaggtggcggcccattgggcgacaataaccaaggtgccgatggagtgggcaatgcctcgggagattggcattgcgattccacgtggatgggggacagagtcgtcaccaagtccacccgaacctgggtgctgcccagctacaacaaccaccagtaccgagagatcaaaagcggctccgtcgacggaagcaacgccaacgcctactttggatacagcaccccctgggggtactttgactttaaccgcttccacagccactggagcccccgagactggcaaagactcatcaacaactactggggcttcagaccccggtccctcagagtcaaaatcttcaacattcaagtcaaagaggtcacggtgcaggactccaccaccaccatcgccaacaacctcacctccaccgtccaagtgtttacggacgacgactaccagctgccctacgtcgtcggcaacgggaccgagggatgcctgccggccttccctccgcaggtctttacgctgccgcagtacggttacgcgacgctgaaccgcgacaacacagaaaatcccaccgagaggagcagcttcttctgcctagagtactttcccagcaagatgctgagaacgggcaacaactttgagtttacctacaactttgaggaggtgcccttccactccagcttcgctcccagtcagaacctgttcaagctggccaacccgctggtggaccagtacttgtaccgcttcgtgagcacaaataacactggcggagtccagttcaacaagaacctggccgggagatacgccaacacctacaaaaactggttcccggggcccatgggccgaacccagggctggaacctgggctccggggtcaaccgcgccagtgtcagcgccttcgccacgaccaataggatggagctcgagggcgcgagttaccaggtgcccccgcagccgaacggcatgaccaacaacctccagggcagcaacacctatgccctggagaacactatgatcttcaacagccagccggcgaacccgggcaccaccgccacgtacctcgagggcaacatgctcatcaccagcgagagcgagacgcagccggtgaaccgcgtggcgtacaacgtcggcgggcagatggccaccaacaaccagagctccaccactgcccccgcgaccggcacgtacaacctccaggaaatcgtgcccggcagcgtgtggatggagagggacgtgtacctccaaggacccatctgggccaagatcccagagacgggggcgcactttcacccctctccggccatgggcggattcggactcaaacacccaccgcccatgatgctcatcaagaacacgcctgtgcccggaaatatcaccagcttctcggacgtgcccgtcagcagcttcatcacccagtacagcaccgggcaggtcaccgtggagatggagtgggagctcaagaaggaaaactccaagaggtggaacccagagatccagtacacaaacaactacaacgacccccagtttgtggactttgccccggacagcaccggggaatacagaaccaccagacctatcggaacccgataccttacccgacccctt

SEQ ID NO: 5179 - DNA, 2214 bp, synthetic construct
  source 1..2214: mol_type = other DNA
atggctgccgatggttatcttccagattggctcgaggacaacctctctgagggcattcgcgagtggtgggcgctgaaacctggagccccgaagcccaaagccaaccagcaaaagcaggacgacggccggggtctggtgcttcctggctacaagtacctcggacccttcaacggactcgacaagggggagcccgtcaacgcggcggacgcagcggccctcgagcacgacaaggcctacgaccagcagctgcaggcgggtgacaatccgtacctgcggtataaccacgccgacgccgagtttcaggagcgtctgcaagaagatacgtcttttgggggcaacctcgggcgagcagtcttccaggccaagaagcgggttctcgaacctctcggtctggttgaggaaggcgctaagacggctcctggaaagaagagaccggtagagccatcaccccagcgttctccagactcctctacgggcatcggcaagaaaggccaacagcccgccagaaaaagactcaattttggtcagactggcgactcagagtcagttccagaccctcaacctctcggagaacctccagcagcgccctctggtgtgggacctaatacaatggctgcaggcggtggcgcaccaatggcagacaataacgaaggcgccgacggagtgggtagttcctcgggaaattggcattgcgattccacatggctgggcgacagagtcatcaccaccagcacccgaacctgggccctgcccacctacaacaaccacctctacaagcaaatctccaacgggacatcgggaggagccaccaacgacaacacctacttcggctacagcaccccctgggggtattttgactttaacagattccactgccacttttcaccacgtgactggcagcgactcatcaacaacaactggggattccggcccaagagactcagcttcaagctcttcaacatccaggtcaaggaggtcacgcagaatgaaggcaccaagaccatcgccaataacctcaccagcaccatccaggtgtttacggactcggagtaccagctgccgtacgttctcggctctgcccaccagggctgcctgcctccgttcccggcggacgtgttcatgattccccagtacggctacctaacactcaacaacggtagtcaggccgtgggacgctcctccttctactgcctggaatactttccttcgcagatgctgagaaccggcaacaacttccagtttacttacaccttcgaggacgtgcctttccacagcagctacgcccacagccagagcttggaccggctgatgaatcctctgattgaccagtacctgtactacttgtctcggactcaaacaacaggaggcacggcaaatacgcagactctgggcttcagccaaggtgggcctaatacaatggccaatcaggcaaagaactggctgccaggaccctgttaccgccaacaacgcgtctcaacgacaaccgggcaaaacaacaatagcaactttgcctggactgctgggaccaaataccatctgaatggaagaaattcattggctaatcctggcatcgctatggcaacacacaaagacgacgaggagcgtttttttcccagtaacgggatcctgatttttggcaaacaaaatgctgccagagacaatgcggattacagcgatgtcatgctcaccagcgaggaagaaatcaaaaccactaaccctgtggctacagaggaatacggtatcgtggcagataacttgcctgagcggacggcgatgagtcttccgggaactgtcaacagccagggggccttacccggtatggtctggcagaaccgggacgtgtacctgcagggtcccatctgggccaagattcctcacacggacggcaacttccacccgtctccgctgatgggcggctttggcctgaaacatcctccgcctcagatcctgatcaagaacacgcctgtacctgcggatcctccgaccaccttcaaccagtcaaagctgaactctttcatcacgcaatacagcaccggacaggtcagcgtggaaattgaatgggagctgcagaaggaaaacagcaagcgctggaaccccgagatccagtacacctccaactactacaaatctacaagtgtggactttgctgttaatacagaaggcgtgtactctgaaccccgccccattggcacccgttacctcacccgtaatctg

SEQ ID NO: 5180 - protein, 738 aa, synthetic construct
MAADGYLPDWLEDNLSEGIREWWALKPGAPKPKANQQKQDDGRGLVLPGYKYLGPFNGLDKGEPVNAADAAALEHDKAYDQQLQAGDNPYLRYNHADAEFQERLQEDTSFGGNLGRAVFQAKKRVLEPLGLVEEGAKTAPGKKRPVEPSPQRSPDSSTGIGKKGQQPARKRLNFGQTGDSESVPDPQPLGEPPAAPSGVGPNTMAAGGGAPMADNNEGADGVGSSSGNWHCDSTWLGDRVITTSTRTWALPTYNNHLYKQISNGTSGGATNDNTYFGYSTPWGYFDFNRFHCHFSPRDWQRLINNNWGFRPKRLSFKLFNIQVKEVTQNEGTKTIANNLTSTIQVFTDSEYQLPYVLGSAHQGCLPPFPADVFMIPQYGYLTLNNGSQAVGRSSFYCLEYFPSQMLRTGNNFQFTYTFEDVPFHSSYAHSQSLDRLMNPLIDQYLYYLSRTQTTGGTANTQTLGFSQGGPNTMANQAKNWLPGPCYRQQRVSTTTGQNNNSNFAWTAGTKYHLNGRNSLANPGIAMATHKDDEERFFPSNGILIFGKQNAARDNADYSDVMLTSEEEIKTTNPVATEEYGIVADNLPERTAMSLPGTVNSQGALPGMVWQNRDVYLQGPIWAKIPHTDGNFHPSPLMGGFGLKHPPPQILIKNTPVPADPPTTFNQSKLNSFITQYSTGQVSVEIEWELQKENSKRWNPEIQYTSNYYKSTSVDFAVNTEGVYSEPRPIGTRYLTRNL

SEQ ID NO: 5181 - DNA, 2214 bp, synthetic construct
  source 1..2214: mol_type = other DNA
atggctgccgatggttatcttccagattggctcgaggacaacctctctgagggcattcgcgagtggtgggcgctgaaacctggagccccgaagcccaaagccaaccagcaaaagcaggacgacggccggggtctggtgcttcctggctacaagtacctcggacccttcaacggactcgacaagggggagcccgtcaacgcggcggacgcagcggccctcgagcacgacaaggcctacgaccagcagctgcaggcgggtgacaatccgtacctgcggtataaccacgccgacgccgagtttcaggagcgtctgcaagaagatacgtcttttgggggcaacctcgggcgagcagtcttccaggccaagaagcgggttctcgaacctctcggtctggttgaggaaggcgctaagacggctcctggaaagaagagaccggtagagccatcaccccagcgttctccagactcctctacgggcatcggcaagaaaggccaacagcccgccagaaaaagactcaattttggtcagactggcgactcagagtcagttccagaccctcaacctctcggagaacctccagcagcgccctctggtgtgggacctaatacaatggctgcaggcggtggcgcaccaatggcagacaataacgaaggcgccgacggagtgggtagttcctcgggaaattggcattgcgattccacatggctgggcgacagagtcatcaccaccagcacccgaacctgggccctgcccacctacaacaaccacctctacaagcaaatctccaacgggacatcgggaggagccaccaacgacaacacctacttcggctacagcaccccctgggggtattttgactttaacagattccactgccacttttcaccacgtgactggcagcgactcatcaacaacaactggggattccggcccaagagactcagcttcaagctcttcaacatccaggtcaaggaggtcacgcagaatgaaggcaccaagaccatcgccaataacctcaccagcaccatccaggtgtttacggactcggagtaccagctgccgtacgttctcggctctgcccaccagggctgcctgcctccgttcccggcggacgtgttcatgattccccagtacggctacctaacactcaacaacggtagtcaggccgtgggacgctcctccttctactgcctggaatactttccttcgcagatgctgagaaccggcaacaacttccagtttacttacaccttcgaggacgtgcctttccacagcagctacgcccacagccagagcttggaccggctgatgaatcctctgattgaccagtacctgtactacttgtctcggactcaaacaacaggaggcacggcaaatacgcagactctgggcttcagccaaggtgggcctaatacaatggccaatcaggcaaagaactggctgccaggaccctgttaccgccaacaacgcgtctcaacgacaaccgggcaaaacaacaatagcaactttgcctggactgctgggaccaaataccatctgaatggaagaaattcattggctaatcctggcatcgctatggcaacacacaaagacgacgaggagcgtttttttcccagtaacgggatcctgatttttggcaaacaaaatgctgccagagacaatgcggattacagcgatgtcatgctcaccagcgaggaagaaatcaaaaccactaaccctgtggctacagaggaatacggtatcgtggcagataacttgagttttagtcgtgcggttctttgtgatggaactgtcaacagccagggggccttacccggtatggtctggcagaaccgggacgtgtacctgcagggtcccatctgggccaagattcctcacacggacggcaacttccacccgtctccgctgatgggcggctttggcctgaaacatcctccgcctcagatcctgatcaagaacacgcctgtacctgcggatcctccgaccaccttcaaccagtcaaagctgaactctttcatcacgcaatacagcaccggacaggtcagcgtggaaattgaatgggagctgcagaaggaaaacagcaagcgctggaaccccgagatccagtacacctccaactactacaaatctacaagtgtggactttgctgttaatacagaaggcgtgtactctgaaccccgccccattggcacccgttacctcacccgtaatctg

SEQ ID NO: 5182 - protein, 738 aa, synthetic construct
MAADGYLPDWLEDNLSEGIREWWALKPGAPKPKANQQKQDDGRGLVLPGYKYLGPFNGLDKGEPVNAADAAALEHDKAYDQQLQAGDNPYLRYNHADAEFQERLQEDTSFGGNLGRAVFQAKKRVLEPLGLVEEGAKTAPGKKRPVEPSPQRSPDSSTGIGKKGQQPARKRLNFGQTGDSESVPDPQPLGEPPAAPSGVGPNTMAAGGGAPMADNNEGADGVGSSSGNWHCDSTWLGDRVITTSTRTWALPTYNNHLYKQISNGTSGGATNDNTYFGYSTPWGYFDFNRFHCHFSPRDWQRLINNNWGFRPKRLSFKLFNIQVKEVTQNEGTKTIANNLTSTIQVFTDSEYQLPYVLGSAHQGCLPPFPADVFMIPQYGYLTLNNGSQAVGRSSFYCLEYFPSQMLRTGNNFQFTYTFEDVPFHSSYAHSQSLDRLMNPLIDQYLYYLSRTQTTGGTANTQTLGFSQGGPNTMANQAKNWLPGPCYRQQRVSTTTGQNNNSNFAWTAGTKYHLNGRNSLANPGIAMATHKDDEERFFPSNGILIFGKQNAARDNADYSDVMLTSEEEIKTTNPVATEEYGIVADNLSFSRAVLCDGTVNSQGALPGMVWQNRDVYLQGPIWAKIPHTDGNFHPSPLMGGFGLKHPPPQILIKNTPVPADPPTTFNQSKLNSFITQYSTGQVSVEIEWELQKENSKRWNPEIQYTSNYYKSTSVDFAVNTEGVYSEPRPIGTRYLTRNL

SEQ ID NO: 5183 - DNA, 2215 bp, synthetic construct
  source 1..2215: mol_type = other DNA
atggctgccgatggttatcttccagattggctcgaggacactctctctgaaggaataagacagtggtggaagctcaaacctggcccaccaccaccaaagcccgcagagcggcataaggacgacagcaggggtcttgtgcttcctgggtacaagtacctcggacccttcaacggactcgacaagggagagccggtcaacgaggcagacgccgcggccctcgagcacgacaaagcctacgaccggcagctcgacagcggagacaacccgtacctcaagtacaaccacgccgacgccgagttccaggagcggctcaaagaagatacgtcttttgggggcaacctcgggcgagcagtcttccaggccaaaaagaggcttcttgaacctcttggtctggttgaggaagcggctaagacggctcctggaaagaagaggcctgtagagcactctcctgtggagccagactcctcctcgggaaccggaaaggcgggccagcagcctgcaagaaaaagattgaattttggtcagactggagacgcagactcagtcccagaccctcaaccaatcggagaacctcccgcagccccctcaggtgtgggatctcttacaatggctgcaggcggtggcgcaccaatggcagacaataacgagggcgccgacggagtgggtaattcctcgggaaattggcattgcgattccacatggatgggcgacagagtcatcaccaccagcacccgaacctgggccctgcccacctacaacaaccacctctacaagcaaatctccaacagcacatctggaggatcttcaaatgacaacgcctacttcggctacagcaccccctgggggtattttgactttaacagattccactgccacttttcaccacgtgactggcagcgactcatcaacaacaactggggattccggcccaagagactcagcttcaagctcttcaacatccaggtcaaggaggtcacgcagaatgaaggcaccaagaccatcgccaataacctcaccagcaccatccaggtgtttacggactcggagtaccagctgccgtacgttctcggctctgcccaccagggctgcctgcctccgttcccggcggacgtgttcatgattccccagtacggctacctaacactcaacaacggtagtcaggccgtgggacgctcctccttctactgcctggaatactttccttcgcagatgctgagaaccggcaacaacttccagtttacttacaccttcgaggacgtgcctttccacagcagctacgcccacagccagagcttggaccggctgatgaatcctctgattgaccagtacctgtactacttgtctcggactcaaacaacaggaggcacgacaaatacgcagactctgggcttcagccaaggtgggcctaatacaatggccaatcaggcaaagaactggctgccaggaccctgttaccgccagcagcgagtatcaaagacatctgcggataacaacaacagtgaatactcgtggactggagctaccaagtaccacctcaatggcagagactctctggtgaatccgggcccggccatggcaagccacaaggacgatgaagaaaagtttttttcctcagagcggggttctcatctttgggaagcaaggctcagagaaaacaaatgtggacattgaaaaggtcatgattacagacgaagaggaaatcaggacaaccaatcccgtggctacggagcagtatggttctgtatctaccaacctccagagaggcaacagacaagcagctaccgcagatgtcaacacacaaggcgttcttccaggcatggtctggcaggacagagatgtgtaccttcaggggcccatctgggcaaagattccacacacggacggacattttcacccctctcccctcatgggtggattcggacttaaacaccctccgcctcagatcctgatcaagaacacgcctgtacctgcggatcctccgaccaccttcaaccagtcaaagctgaactctttcatcacccagtattctactggccaagtcagcgtggagatcgagtgggagctgcagaaggaaaacagcaagcgctggaaccccgagatccagtacacctccaactactacaaatctacaagtgtggactttgctgttaatacagaaggcgtgtactctgaaccccgccccattggcacccgttacctcacccgtaatctgtaa

SEQ ID NO: 5184 - protein, 737 aa, synthetic construct
MAADGYLPDWLEDTLSEGIRQWWKLKPGPPPPKPAERHKDDSRGLVLPGYKYLGPFNGLDKGEPVNEADAAALEHDKAYDRQLDSGDNPYLKYNHADAEFQERLKEDTSFGGNLGRAVFQAKKRLLEPLGLVEEAAKTAPGKKRPVEHSPVEPDSSSGTGKAGQQPARKRLNFGQTGDADSVPDPQPIGEPPAAPSGVGSLTMAAGGGAPMADNNEGADGVGNSSGNWHCDSTWMGDRVITTSTRTWALPTYNNHLYKQISNSTSGGSSNDNAYFGYSTPWGYFDFNRFHCHFSPRDWQRLINNNWGFRPKRLSFKLFNIQVKEVTQNEGTKTIANNLTSTIQVFTDSEYQLPYVLGSAHQGCLPPFPADVFMIPQYGYLTLNNGSQAVGRSSFYCLEYFPSQMLKTGNNFQFTYTFEDVPFHSSYAHSQSLDRLMNPLIDQYLYYLSRTQTTGGTTNTQTLGFSQGGPNTMANQAKNWLPGPCYRQQRVSKTSADNNNSEYSWTGATKYHLNGRDSLVNPGPAMASHKDDEEKFFPQSGVLIFGKQGSEKTNVDIEKVMITDEEEIRTTNPVATEQYGSVSTNLQRGNRQAATADVNTQGVLPGMVWQDRDVYLQGPIWAKIPHTDGHFHPSPLMGGFGLKHPPPQILIKNTPVPADPPTTFNQSKLNSFITQYSTGQVSVEIEWELQKENSKRWNPEIQYTSNYYKSTSVDFAVNTEGVYSEPRPIGTRYLTRNL

SEQ ID NO: 5185 - protein, 737 aa, synthetic construct
MAADGYLPDWLEDTLSEGIRQWWKLKPGPPPPKPAERHKDDSRGLVLPGYKYLGPFNGLDKGEPVNEADAAALEHDKAYDRQLDSGDNPYLKYNHADAEFQERLKEDTSFGGNLGRAVFQAKKRLLEPLGLVEEAAKTAPGKKRPVEHSPVEPDSSSGTGKAGQQPARKRLNFGQTGDADSVPDPQPIGEPPAAPSGVGSLTMAAGGGAPMADNNEGADGVGNSSGNWHCDSTWMGDRVITTSTRTWALPTYNNHLYKQISNSTSGGSSNDNAYFGYSTPWGYFDFNRFHCHFSPRDWQRLINNNWGFRPKRLSFKLFNIQVKEVTQNEGTKTIANNLTSTIQVFTDSEYQLPYVLGSAHQGCLPPFPADVFMIPQYGYLTLNNGSQAVGRSSFYCLEYFPSQMLKTGNNFQFTYTFEDVPFHSSYAHSQSLDRLMNPLIDQYLYYLSRTQTTGGTTNTQTLGFSQGGPNTMANQAKNWLPGPCYRQQRVSKTSADNNNSEYSWTGATKYHLNGRDSLVNPGPAMASHKDDEEKFFPQSGVLIFGKQGSEKTNVDIEKVMITDEEEIRTTNPVATEQYGSVSTNLQQGNTQAATADVNTQGVLPGMVWQDRDVYLQGPIWAKIPHTDGHFHPSPLMGGFGLKHPPPQILIKNTPVPADPPTTFNQSKLNSFITQYSTGQVSVEIEWELQKENSKRWNPEIQYTSNYYKSTSVDFAVNTEGVYSEPRPIGTRYLTRNL

SEQ ID NO: 5186 - protein, 737 aa, synthetic construct
MAADGYLPDWLEDTLSEGIRQWWKLKPGPPPPKPAERHKDDSRGLVLPGYKYLGPFNGLDKGEPVNEADAAALEHDKAYDRQLDSGDNPYLKYNHADAEFQERLKEDTSFGGNLGRAVFQAKKRLLEPLGLVEEAAKTAPGKKRPVEHSPVEPDSSSGTGKAGQQPARKRLNFGQTGDADSVPDPQPIGEPPAAPSGVGSLTMAAGGGAPMADNNEGADGVGNSSGNWHCDSTWMGDRVITTSTRTWALPTYNNHLYKQISNSTSGGSSNDNAYFGYSTPWGYFDFNRFHCHFSPRDWQRLINNNWGFRPKRLSFKLFNIQVKEVTQNEGTKTIANNLTSTIQVFTDSEYQLPYVLGSAHQGCLPPFPADVFMIPQYGYLTLNNGSQAVGRSSFYCLEYFPSQMLRTGNNFQFTYTFEDVPFHSSYAHSQSLDRLMNPLIDQYLYYLSRTQTTGGTTNTQTLGFSQGGPNTMANQAKNWLPGPCYRQQRVSKTSADNNNSEYSWTGATKYHLNGRDSLVNPGPAMASHKDDEEKFFPQSGVLIFGKQGSEKTNVDIEKVMITDEEEIRTTNPVATEQYGSVSTNLQQGNTQAATADVNTQGVLPGMVWQDRDVYLQGPIWAKIPHTDGHFHPSPLMGGFGLKHPPPQILIKNTPVPADPPTTFNQSKLNSFITQYSTGQVSVEIEWELQKENSKRWNPEIQYTSNYYKSTSVDFAVNTEGVYSEPRPIGTRYLTRNL

SEQ ID NO: 5187 - DNA, 2214 bp, synthetic construct
  source 1..2214: mol_type = other DNA
atggctgccgatggttatcttccagattggctcgaggacaaccttagtgaaggaattcgcgagtggtgggctttgaaacctggagcccctcaacccaaggcaaatcaacaacatcaagacaacgctcgaggtcttgtgcttccgggttacaaataccttggacccggcaacggactcgacaagggggagccggtcaacgcagcagacgcggcggccctcgagcacgacaaggcctacgaccagcagctgcaggcgggtgacaatccgtacctgcggtataaccacgccgacgccgagtttcaggagcgtctgcaagaagatacgtcttttgggggcaaccttggcagagcagtcttccaggccaaaaagaggatccttgagcctcttggtctggttgaggaagcagctaaaacggctcctggaaagaagaggcctgtagatcagtctcctcaggaaccggactcatcatctggtgttggcaaatcgggcaaacagcctgccagaaaaagactaaatttcggtcagactggcgactcagagtcagtcccagaccctcaacctctcggagaaccaccagcagcccccacaagtttgggatctaatacaatggcttcaggcggtggcgcaccaatggcagacaataacgagggtgccgatggggtgggtagttcctcgggaaattggcattgcgattcccaatggctgggggacagagtcatcaccaccagcacccgaacctgggccctgcccacctacaacaatcacctctacaagcaaatctccaacgggacatcgggaggagccaccaacgacaacacctacttcggctacagcaccccctgggggtattttgactttaacagattccactgccacttttcaccacgtgactggcagcgactcatcaacaacaactggggattccggcccaagagactcagcttcaagctcttcaacatccaggtcaaggaggtcacgcagaatgaaggcaccaagaccatcgccaataacctcaccagcaccatccaggtgtttacggactcggagtaccagctgccgtacgttctcggctctgcgcaccagggctgcctccctccgttcccggcggacgtgttcatgattccgcaatacggctacctgacgctcaacaatggcagccaagccgtgggacgttcatccttttactgcctggaatatttcccttctcagatgctgagaacgggcaacaactttaccttcagctacacctttgaggaagtgcctttccacagcagctacgcgcacagccagagcttggaccggctgatgaatcctctgattgaccagtacctgtactacttgtctcggactcaaacaacaggaggcacggcaaatacgcagactctgggcttcagccaaggtgggcctaatacaatggccaatcaggcaaagaactggctgccaggaccctgttaccgccaacaacgcgtctcaacgacaaccgggcaaaacaacaatagcaactttgcctggactgctgggaccaaataccatctgaatggaagaaattcattggctaatcctggcatcgctatggcaacacacaaagacgacgaggagcgtttttttcccagtaacgggatcctgatttttggcaaacaaaatgctgccagagacaatgcggattacagcgatgtcatgctcaccagcgaggaagaaatcaaaaccactaaccctgtggctacagaggaatacggtatcgtggcagataacttgcagcagcaaaacacggctcctcaaattggaactgtcaacagccagggggccttacccggtatggtctggcagaaccgggacgtgtacctgcagggtcccatctgggccaagattcctcacacggacggcaacttccacccgtctccgctgatgggcggctttggcctgaaacatcctccgcctcagatcctgatcaagaacacgcctgtacctgcggatcctccgaccaccttcaaccagtcaaagctgaactctttcatcacgcaatacagcaccggacaggtcagcgtggagatcgagtgggagctgcagaaggaaaacagcaagcgctggaacccggagatccagtacacttccaactattacaagtctaataatgttgaatttgctgttaatactgaaggtgtatatagtgaaccccgccccattggcaccagatacctgactcgtaatctgtaa

SEQ ID NO: 5188 - protein, 737 aa, synthetic construct
MAADGYLPDWLEDNLSEGIREWWALKPGAPQPKANQQHQDNARGLVLPGYKYLGPGNGLDKGEPVNAADAAALEHDKAYDQQLQAGDNPYLRYNHADAEFQERLQEDTSFGGNLGRAVFQAKKRILEPLGLVEEAAKTAPGKKRPVDQSPQEPDSSSGVGKSGKQPARKRLNFGQTGDSESVPDPQPLGEPPAAPTSLGSNTMASGGGAPMADNNEGADGVGSSSGNWHCDSQWLGDRVITTSTRTWALPTYNNHLYKQISNGTSGGATNDNTYFGYSTPWGYFDFNRFHCHFSPRDWQRLINNNWGFRPKRLSFKLFNIQVKEVTQNEGTKTIANNLTSTIQVFTDSEYQLPYVLGSAHQGCLPPFPADVFMIPQYGYLTLNNGSQAVGRSSFYCLEYFPSQMLRTGNNFTFSYTFEEVPFHSSYAHSQSLDRLMNPLIDQYLYYLSRTQTTGGTANTQTLGFSQGGPNTMANQAKNWLPGPCYRQQRVSTTTGQNNNSNFAWTAGTKYHLNGRNSLANPGIAMATHKDDEERFFPSNGILIFGKQNAARDNADYSDVMLTSEEEIKTTNPVATEEYGIVADNLQQQNTAPQIGTVNSQGALPGMVWQNRDVYLQGPIWAKIPHTDGNFHPSPLMGGFGLKHPPPQILIKNTPVPADPPTTFNQSKLNSFITQYSTGQVSVEIEWELQKENSKRWNPEIQYTSNYYKSNNVEFAVNTEGVYSEPRPIGTRYLTRNL

SEQ ID NO: 5189 - DNA, 2211 bp, synthetic construct
  source 1..2211: mol_type = other DNA
atggctgccgatggttatcttccagattggctcgaggacaacctctctgagggcattcgcgagtggtgggacttgaaacctggagccccgaagcccaaagccaaccagcaaaagcaggacgacggccggggtctggtgcttcctggctacaagtacctcggacccttcaacggactcgacaagggggagcccgtcaacgcggcggacgcagcggccctcgagcacgacaaggcctacgaccagcagctcaaagcgggtgacaatccgtacctgcggtataaccacgccgacgccgagtttcaggagcgtctgcaagaagatacgtcttttgggggcaacctcgggcgagcagtcttccaggccaagaagcgggttctcgaacctctcggtctggttgaggaaggcgctaagacggctcctggaaagaaacgtccggtagagcagtcgccacaagagccagactcctcctcgggcatcggcaagacaggccagcagcccgctaaaaagagactcaattttggtcagactggcgactcagagtcagtccccgacccacaacctctcggagaacctccagcaacccccgctgctgtgggacctactacaatggcttcaggcggtggcgcaccaatggcagacaataacgaaggcgccgacggagtgggtaatgcctcaggaaattggcattgcgattccacatggctgggcgacagagtcatcaccaccagcacccgaacatgggccttgcccacctataacaaccacctctacaagcaaatctccagtgcttcaacgggggccagcaacgacaaccactacttcggctacagcaccccctgggggtattttgatttcaacagattccactgccatttctcaccacgtgactggcagcgactcatcaacaacaattggggattccggcccaagagactcaacttcaagctcttcaacatccaagtcaaggaggtcacgacgaatgatggcgtcacgaccatcgctaataaccttaccagcacggttcaagtcttctcggactcggagtaccagctgccgtacgttctcggctctgcccaccagggctgcctgcctccgttcccggcggacgtgttcatgattccccagtacggctacctaacactcaacaacggtagtcaggccgtgggacgctcctccttctactgcctggaatactttccttcgcagatgctgagaaccggcaacaacttccagtttacttacaccttcgaggacgtgcctttccacagcagctacgcccacagccagagcttggaccggctgatgaatcctctgattgaccagtacctgtactacttgtctcggactcaaacaacaggaggcacggcaaatacgcagactctgggcttcagccaaggtgggcctaatacaatggccaatcaggcaaagaactggctgccaggaccctgttaccgccaacaacgcgtctcaacgacaaccgggcaaaacaacaatagcaattttacctggactggtgcttcaaaatataacctcaatgggcgtgaatccatcatcaaccctggcactgctatggcctcacacaaagacgacgaagacaagttctttcccatgagcggtgtcatgatttttggaaaagagagcgccggagcttcaaacactgcattggacaatgtcatgattacagacgaagaggaaattaaagccactaaccctgtggccaccgaaagatttgggaccgtggcagtcaatttccagagcagcagcacagaccctgcgaccggagatgtgcatgctatgggagcattacctggcatggtgtggcaagatagagacgtgtacctgcagggtcccatttgggccaaaattcctcacacagatggacactttcacccgtctcctcttatgggcggctttggactcaagaacccgcctcctcagatcctcatcaaaaacacgcctgttcctgcgaatcctccggcggagttttcagctacaaagtttgcttcattcatcacccaatactccacaggacaagtgagtgtggaaattgaatgggagctgcagaaagaaaacagcaagcgctggaatcccgaagtgcagtacacatccaattatgcaaaatctgccaacgttgattttactgtggacaacaatggactttatactgagcctcgccccattggcacccgttacctcacccgtcccctgtaa

SEQ ID NO: 5190 - protein, 736 aa, synthetic construct
MAADGYLPDWLEDNLSEGIREWWDLKPGAPKPKANQQKQDDGRGLVLPGYKYLGPFNGLDKGEPVNAADAAALEHDKAYDQQLKAGDNPYLRYNHADAEFQERLQEDTSFGGNLGRAVFQAKKRVLEPLGLVEEGAKTAPGKKRPVEQSPQEPDSSSGIGKTGQQPAKKRLNFGQTGDSESVPDPQPLGEPPATPAAVGPTTMASGGGAPMADNNEGADGVGNASGNWHCDSTWLGDRVITTSTRTWALPTYNNHLYKQISSASTGASNDNHYFGYSTPWGYFDFNRFHCHFSPRDWQRLINNNWGFRPKRLNFKLFNIQVKEVTTNDGVTTIANNLTSTVQVFSDSEYQLPYVLGSAHQGCLPPFPADVFMIPQYGYLTLNNGSQAVGRSSFYCLEYFPSQMLRTGNNFQFTYTFEDVPFHSSYAHSQSLDRLMNPLIDQYLYYLSRTQTTGGTANTQTLGFSQGGPNTMANQAKNWLPGPCYRQQRVSTTTGQNNNSNFTWTGASKYNLNGRESIINPGTAMASHKDDEDKFFPMSGVMIFGKESAGASNTALDNVMITDEEEIKATNPVATERFGTVAVNFQSSSTDPATGDVHAMGALPGMVWQDRDVYLQGPIWAKIPHTDGHFHPSPLMGGFGLKNPPPQILIKNTPVPANPPAEFSATKFASFITQYSTGQVSVEIEWELQKENSKRWNPEVQYTSNYAKSANVDFTVDNNGLYTEPRPIGTRYLTRPL

SEQ ID NO: 5191 - DNA, 2211 bp, synthetic construct
  source 1..2211: mol_type = other DNA
atggctgctgacggttatcttccagattggctcgaggacaacctttctgaaggcattcgagagtggtgggcgctgcaacctggagcccctaaacccaaggcaaatcaacaacatcaggacaacgctcggggtcttgtgcttccgggttacaaatacctcggacccggcaacggactcgacaagggggaacccgtcaacgcagcggacgcggcagccctcgagcacgacaaggcctacgaccagcagctcaaggccggtgacaacccctacctcaagtacaaccacgccgacgccgagttccaggagcggctcaaagaagatacgtcttttgggggcaacctcgggcgagcagtcttccaggccaaaaagaggcttcttgaacctcttggtctggttgaggaagcggctaagacggctcctggaaagaagaggcctgtagatcagtctcctcaggaaccggactcatcatctggtgttggcaaatcgggcaaacagcctgccagaaaaagactaaatttcggtcagactggcgactcagagtcagtcccagaccctcaacctctcggagaaccaccagcagcccccacaagtttgggatctaatacaatggcttcaggcggtggcgcaccaatggcagacaataacgagggtgccgatggagtgggtaattcctcaggaaattggcattgcgattcccaatggctgggcgacagagtcatcaccaccagcaccagaacctgggccctgcccacttacaacaaccatctctacaagcaaatctccagccaatcaggagcttcaaacgacaaccactactttggctacagcaccccttgggggtattttgactttaacagattccactgccacttctcaccacgtgactggcagcgactcattaacaacaactggggattccggcccaagaaactcagcttcaagctcttcaacatccaagttaaagaggtcacgcagaacgatggcacgacgactattgccaataaccttaccagcacggttcaagtgtttacggactcggagtatcagctcccgtacgtgctcgggtcggcgcaccaaggctgtctcccgccgtttccagcggacgtcttcatggtccctcagtatggatacctcaccctgaacaacggaagtcaagcggtgggacgctcatccttttactgcctggagtacttcccttcgcagatgctaaggactggaaataacttccaattcagctataccttcgaggatgtaccttttcacagcagctacgctcacagccagagtttggatcgcttgatgaatcctcttattgatcagtatctgtactacctgaacagaacgcaaggaacaacctctggaacaaccaaccaatcacggctgctttttagccaggctgggcctcagtctatgtctttgcaggccagaaattggctacctgggccctgctaccggcaacagagactttcaaagactgctaacgacaacaacaacagtaactttccttggacagcggccagcaaatatcatctcaatggccgcgactcgctggtgaatccaggaccagctatggccagtcacaaggacgatgaagaaaaatttttccctatgcacggcaatctaatatttggcaaagaagggacaacggcaagtaacgcagaattagataatgtaatgattacggatgaagaagagattcgtaccaccaatcctgtggcaacagagcagtatggaactgtggcaaataacttgcagagctcaaatacagctcccacgactagaactgtcaatgatcagggggccttacctggcatggtgtggcaagatcgtgacgtgtaccttcaaggacctatctgggcaaagattcctcacacggatggacactttcatccttctcctctgatgggaggctttggactgaaacatccgcctcctcaaatcatgatcaaaaatactccggtaccggcaaatcctccgacgactttcagcccggccaagtttgcttcatttatcactcagtactccactggacaggtcagcgtggaaattgagtgggagctacagaaagaaaacagcaaacgttggaatccagagattcagtacacttccaactacaacaagtctgttaatgtggactttactgtagacactaatggtgtttatagtgaacctcgccccattggcacccgttaccttacccgtcccctgtaa

SEQ ID NO: 5192 - protein, 736 aa, synthetic construct
MAADGYLPDWLEDNLSEGIREWWALQPGAPKPKANQQHQDNARGLVLPGYKYLGPGNGLDKGEPVNAADAAALEHDKAYDQQLKAGDNPYLKYNHADAEFQERLKEDTSFGGNLGRAVFQAKKRLLEPLGLVEEAAKTAPGKKRPVDQSPQEPDSSSGVGKSGKQPARKRLNFGQTGDSESVPDPQPLGEPPAAPTSLGSNTMASGGGAPMADNNEGADGVGNSSGNWHCDSQWLGDRVITTSTRTWALPTYNNHLYKQISSQSGASNDNHYFGYSTPWGYFDFNRFHCHFSPRDWQRLINNNWGFRPKKLSFKLFNIQVKEVTQNDGTTTIANNLTSTVQVFTDSEYQLPYVLGSAHQGCLPPFPADVFMVPQYGYLTLNNGSQAVGRSSFYCLEYFPSQMLRTGNNFQFSYTFEDVPFHSSYAHSQSLDRLMNPLIDQYLYYLNRTQGTTSGTTNQSRLLFSQAGPQSMSLQARNWLPGPCYRQQRLSKTANDNNNSNFPWTAASKYHLNGRDSLVNPGPAMASHKDDEEKFFPMHGNLIFGKEGTTASNAELDNVMITDEEEIRTTNPVATEQYGTVANNLQSSNTAPTTRTVNDQGALPGMVWQDRDVYLQGPIWAKIPHTDGHFHPSPLMGGFGLKHPPPQIMIKNTPVPANPPTTFSPAKFASFITQYSTGQVSVEIEWELQKENSKRWNPEIQYTSNYNKSVNVDFTVDTNGVYSEPRPIGTRYLTRPL

SEQ ID NO: 5193 - DNA, 2211 bp, synthetic construct
  source 1..2211: mol_type = other DNA
atggctgccgatggttatcttccagattggctcgaggacaaccttagtgaaggaattcgcgagtggtgggctttgaaacctggagcccctcaacccaaggcaaatcaacaacatcaagacaacgctcgaggtcttgtgcttccgggttacaaataccttggacccggcaacggactcgacaagggggagccggtcaacgcagcagacgcggcggccctcgagcacgacaaggcctacgaccagcagctcaaggccggagacaacccgtacctcaagtacaaccacgccgacgccgagttccaggagcggctcaaagaagatacgtcttttgggggcaacctcgggcgagcagtcttccaggccaaaaagaggcttcttgaacctcttggtctggttgaggaagcggctaagacggctcctggaaagaagagaccggtagagccatcaccccagcgttctccagactcctctacgggcatcggcaagaaaggccaacagcccgctaaaaagagactcaattttggtcagactggcgactcagagtcagtccccgacccacaacctctcggagaacctccagcaacccccgctgctgtgggacctactacaatggcttcaggcggtggcgcaccaatggcagacaataacgagggtgccgatggagtgggtaattcctcaggaaattggcattgcgattcccaatggctgggcgacagagtcatcaccaccagcaccagaacctgggccctgcccacttacaacaaccatctctacaagcaaatctccagccaatcaggagcttcaaacgacaaccactactttggctacagcaccccttgggggtattttgactttaacagattccactgccacttttcaccacgtgactggcaaagactcatcaacaacaactggggattccgacccaagagactcaacttcaagctcttcaacatccaagtcaaggaggtcacgacgaatgatggcgtcacgaccatcgctaataaccttaccagcacggttcaagtcttctcggactcggagtaccagttgccgtacgtcctcggctctgcgcaccagggctgcctccctccgttcccggcggacgtgttcatgattccgcagtacggctacctaacgctcaacaatggcagccaagccgtgggacgttcatccttttactgcctggaatatttcccttctcagatgctgagaacgggcaacaactttaccttcagctacacttttgaggacgttcctttccacagcagctacgctcacagccagagtctggaccgtctcatgaatcctctcatcgaccagtacctgtattacttgagcagaacaaacactccaagtggaaccaccacgcagtcaaggcttcagttttctcaggccggagcgagtgacattcgggaccagtctaggaactggcttcctggaccctgttaccgccagcagcgcgtttctaaaacaaaaacagacaacaacaacagcaattttacctggactggtgcttcaaaatataaccttaatgggcgtgaatctataatcaaccctggcactgctatggcctcacacaaagacgacgaagacaagttctttcccatgagcggtgtcatgatttttggaaaagagagcgccggagcttcaaacactgcattggacaatgtcatgattacagacgaagaggaaattaaagccactaaccctgtggccaccgaaagatttgggaccgtggcagtcaatttccagagcagcagcacagaccctgcgaccggagatgtgcatgttatgggagccttacctggaatggtgtggcaagacagagacgtatacctgcagggtcctatttgggccaaaattcctcacacggatggacactttcacccgtctcctcttatgggcggctttggactcaagaacccgcctcctcagatcctcatcaaaaacacgcctgttcctgcgaatcctccggcggagttttcagctacaaagtttgcttcattcatcacccaatactccacaggacaagtgagtgtggaaattgaatgggagctgcagaaagaaaacagcaagcgctggaatcccgaagtgcagtacacatccaattatgcaaaatctgccaacgttgattttactgtggacaacaatggactttatactgagcctcgccccattggcacccgttaccttacccgtcccctgtaa

SEQ ID NO: 5194 - protein, 736 aa, synthetic construct
MAADGYLPDWLEDNLSEGIREWWALKPGAPQPKANQQHQDNARGLVLPGYKYLGPGNGLDKGEPVNAADAAALEHDKAYDQQLKAGDNPYLKYNHADAEFQERLKEDTSFGGNLGRAVFQAKKRLLEPLGLVEEAAKTAPGKKRPVEPSPQRSPDSSTGIGKKGQQPAKKRLNFGQTGDSESVPDPQPLGEPPATPAAVGPTTMASGGGAPMADNNEGADGVGNSSGNWHCDSQWLGDRVITTSTRTWALPTYNNHLYKQISSQSGASNDNHYFGYSTPWGYFDFNRFHCHFSPRDWQRLINNNWGFRPKRLNFKLFNIQVKEVTTNDGVTTIANNLTSTVQVFSDSEYQLPYVLGSAHQGCLPPFPADVFMIPQYGYLTLNNGSQAVGRSSFYCLEYFPSQMLRTGNNFTFSYTFEDVPFHSSYAHSQSLDRLMNPLIDQYLYYLSRTNTPSGTTTQSRLQFSQAGASDIRDQSRNWLPGPCYRQQRVSKTKTDNNNSNFTWTGASKYNLNGRESIINPGTAMASHKDDEDKFFPMSGVMIFGKESAGASNTALDNVMITDEEEIKATNPVATERFGTVAVNFQSSSTDPATGDVHVMGALPGMVWQDRDVYLQGPIWAKIPHTDGHFHPSPLMGGFGLKNPPPQILIKNTPVPANPPAEFSATKFASFITQYSTGQVSVEIEWELQKENSKRWNPEVQYTSNYAKSANVDFTVDNNGLYTEPRPIGTRYLTRPL

SEQ ID NO: 5195 - DNA, 2211 bp, synthetic construct
  source 1..2211: mol_type = other DNA
atggctgccgatggttatcttccagattggctcgaggacaacctctctgagggcattcgcgagtggtgggacttgaaacctggagcccctaaacccaaggcaaatcaacaacatcaggacaacgctcgaggtcttgtgcttccgggttacaaataccttggacccggcaacggactcgacaagggggagccggtcaacgcagcagacgcggcggccctcgagcacgacaaggcctacgaccagcagctcaaggccggagacaacccgtacctcaagtacaaccacgccgacgccgagttccaggagcggctcaaagaagatacgtcttttgggggcaacctcgggcgagcagtcttccaggccaaaaagaggcttcttgaacctcttggtctggttgaggaagcggctaagacggctcctggaaagaagagaccggtagagccatcaccccagcgttctccagactcctctacgggcatcggcaagaaaggccaacagcccgctaaaaagagactcaattttggtcagactggcgactcagagtcagtccccgacccacaacctctcggagaacctccagcaacccccgctgctgtgggacctactacaatggcttcaggcggtggcgcaccaatggcagacaataacgagggtgccgatggagtgggtaattcctcaggaaattggcattgcgattcccaatggctgggcgacagagtcatcaccaccagcaccagaacctgggccctgcccacttacaacaaccatctctacaagcaaatctccagccaatcaggagcttcaaacgacaaccactactttggctacagcaccccttgggggtattttgactttaacagattccactgccacttttcaccacgtgactggcaaagactcatcaacaacaactggggattccgacccaagagactcaacttcaagctcttcaacatccaagtcaaggaggtcacgacgaatgatggcgtcacgaccatcgctaataaccttaccagcacggttcaagtcttctcggactcggagtaccagttgccgtacgtcctcggctctgcgcaccagggctgcctccctccgttcccggcggacgtgttcatgattccgcagtacggctacctaacgctcaacaatggcagccaagccgtgggacgttcatccttttactgcctggaatatttcccttctcagatgctgagaacgggcaacaactttaccttcagctacacttttgaggacgttcctttccacagcagctacgctcacagccagagtctggaccgtctcatgaatcccctcatcgaccagtacctgtattacttgagcagaacaaacactccaagtggaaccaccacgcagtcaaggcttcagttttctcaggccggagcgagtgacattcgggaccagtctaggaactggcttcctggaccctgttaccggcagcagcgcgtttctaaaacaaaaacagacaacaacaacagcaactttacctggactggtgcttcaaaatataaccttaatgggcgtgaatctataatcaaccctggcactgctatggcctcacacaaagacgacgaagacaagttctttcccatgagcggtgtcatgatttttggaaaggagagcgccggagcttcaaacactgcattggacaatgtcatgatcacagacgaagaggaaatcaaagccactaaccccgtggccaccgaaagatttgggactgtggcagtcaatctccagagcagcagcacagaccctgcgaccggagatgtgcatgttatgggagccttacctggaatggtgtggcaagacagagacgtgtacctgcagggtcctatttgggccaaaattcctcacacggatggacactttcacccgtctcctctcatgggcggctttggacttaagcacccgcctcctcagatcctcatcaaaaacacgcctgttcctgcgaatcctccggcagagttttcggctacaaagtttgcttcattcatcacccagtattccacaggacaagtgagtgtggaaattgaatgggagctgcagaaagaaaacagcaagcgctggaatcccgaagtgcagtacacatccaattatgcaaaatctgccaacgttgattttactgtggacaacaatggactttatactgagcctcgccccattggcacccgttacctcacccgtcccctgtaa

SEQ ID NO: 5196 - protein, 736 aa, synthetic construct
MAADGYLPDWLEDNLSEGIREWWDLKPGAPKPKANQQHQDNARGLVLPGYKYLGPGNGLDKGEPVNAADAAALEHDKAYDQQLKAGDNPYLKYNHADAEFQERLKEDTSFGGNLGRAVFQAKKRLLEPLGLVEEAAKTAPGKKRPVEPSPQRSPDSSTGIGKKGQQPAKKRLNFGQTGDSESVPDPQPLGEPPATPAAVGPTTMASGGGAPMADNNEGADGVGNSSGNWHCDSQWLGDRVITTSTRTWALPTYNNHLYKQISSQSGASNDNHYFGYSTPWGYFDFNRFHCHFSPRDWQRLINNNWGFRPKRLNFKLFNIQVKEVTTNDGVTTIANNLTSTVQVFSDSEYQLPYVLGSAHQGCLPPFPADVFMIPQYGYLTLNNGSQAVGRSSFYCLEYFPSQMLRTGNNFTFSYTFEDVPFHSSYAHSQSLDRLMNPLIDQYLYYLSRTNTPSGTTTQSRLQFSQAGASDIRDQSRNWLPGPCYRQQRVSKTKTDNNNSNFTWTGASKYNLNGRESIINPGTAMASHKDDEDKFFPMSGVMIFGKESAGASNTALDNVMITDEEEIKATNPVATERFGTVAVNLQSSSTDPATGDVHVMGALPGMVWQDRDVYLQGPIWAKIPHTDGHFHPSPLMGGFGLKHPPPQILIKNTPVPANPPAEFSATKFASFITQYSTGQVSVEIEWELQKENSKRWNPEVQYTSNYAKSANVDFTVDNNGLYTEPRPIGTRYLTRPL

SEQ ID NO: 5197 - DNA, 2214 bp, synthetic construct
  source 1..2214: mol_type = other DNA
atggctgccgatggttatcttccagattggctcgaggacaaccttagtgaaggaattcgcgagtggtgggctttgaaacctggagcccctcaacccaaggcaaatcaacaacatcaagacaacgctcgaggtcttgtgcttccgggttacaaataccttggacccggcaacggactcgacaagggggagccggtcaacgcagcagacgcggcggccctcgagcacgacaaggcctacgaccagcagctgcaggcgggtgacaatccgtacctgcggtataaccacgccgacgccgagtttcaggagcgtctgcaagaagatacgtcttttgggggcaaccttggcagagcagtcttccaggccaaaaagaggatccttgagcctcttggtctggttgaggaagcagctaaaacggctcctggaaagaagaggcctgtagatcagtctcctcaggaaccggactcatcatctggtgttggcaaatcgggcaaacagcctgccagaaaaagactaaatttcggtcagactggcgactcagagtcagtcccagaccctcaacctctcggagaaccaccagcagcccccacaagtttgggatctaatacaatggcttcaggcggtggcgcaccaatggcagacaataacgagggtgccgatggggtgggtagttcctcgggaaattggcattgcgattcccaatgactgggggacagagtcatcaccaccagcacccgaacctgggccctgcccacctacaacaatcacctctacaagcaaatctccaacgggacatcgggaggagccaccaacgacaacacctacttcggctacagcaccccctgggggtattttgactttaacagattccactgccacttttcaccacgtgactggcagcgactcatcaacaacaactggggattccggcccaagagactcagcttcaagctcttcaacatccaggtcaaggaggtcacgcagaatgaaggcaccaagaccatcgccaataacctcaccagcaccatccaggtgtttacggactcggagtaccagctgccgtacgttctcggctctgcgcaccagggctgcctccctccgttcccggcggacgtgttcatgattccgcaatacggctacctgacgctcaacaatggcagccaagccgtgggacgttcatccttttactgcctggaatatttcccttctcagatgctgagaacgggcaacaactttaccttcagctacacctttgaggaagtgcctttccacagcagctacgcgcacagccagagcttggaccggctgatgaatcctctgattgaccagtacctgtactacttgtctcggactcaaacaacaggaggcacggcaaatacgcagactctgggcttcagccaaggtgggcctaatacaatggccaatcaggcaaagaactggctgccaggaccctgttaccgccaacaacgcgtctcaacgacaaccgggcaaaacaacaatagcaactttgcctggactgctgggaccaaataccatctgaatggaagaaattcattggctaatcctggcatcgctatggcaacacacaaagacgacgaggagcgtttttttcccagtaacgggatcctgatttttggcaaacaaaatgctgccagagacaatgcggattacagcgatgtcatgctcaccagcgaggaagaaatcaaaaccactaaccctgtggctacagaggaatacggtatcgtggcagataacttgcagcagcaaaacacggctcctcaaattggaactgtcaacagccagggggccttacccggtatggtctggcagaaccgggacgtgtacctgcagggtcccatctgggccaagattcctcacacggacggcaacttccacccgtctccgctgatgggcggctttggcctgaaacatcctccgcctcagatcctgatcaagaacacgcctgtacctgcggatcctccgaccaccttcaaccagtcaaagctgaactctttcatcacgcaatacagcaccggacaggtcagcgtggagatcgagtgggagctgcagaaggaaaacagcaagcgctggaacccggagatccagtacacttccaactattacaagtctaataatgttgaatttgctgttaatactgaaggtgtatatagtgaaccccgccccattggcaccagatacctgactcgtaatctgtaa

SEQ ID NO: 5198 - protein, 736 aa, synthetic construct
MAADGYLPDWLEDNLSEGIREWWALKPGAPQPKANQQHQDNARGLVLPGYKYLGPGNGLDKGEPVNAADAAALEHDKAYDQQLQAGDNPYLRYNHADAEFQERLQEDTSFGGNLGRAVFQAKKRILEPLGLVEEAAKTAPGKKRPVDQSPQEPDSSSGVGKSGKQPARKRLNFGQTGDSESVPDPQPLGEPPAAPTSLGSNTMASGGGAPMADNNEGADGVGSSSGNWHCDSQLGDRVITTSTRTWALPTYNNHLYKQISNGTSGGATNDNTYFGYSTPWGYFDFNRFHCHFSPRDWQRLINNNWGFRPKRLSFKLFNIQVKEVTQNEGTKTIANNLTSTIQVFTDSEYQLPYVLGSAHQGCLPPFPADVFMIPQYGYLTLNNGSQAVGRSSFYCLEYFPSQMLRTGNNFTFSYTFEEVPFHSSYAHSQSLDRLMNPLIDQYLYYLSRTQTTGGTANTQTLGFSQGGPNTMANQAKNWLPGPCYRQQRVSTTTGQNNNSNFAWTAGTKYHLNGRNSLANPGIAMATHKDDEERFFPSNGILIFGKQNAARDNADYSDVMLTSEEEIKTTNPVATEEYGIVADNLQQQNTAPQIGTVNSQGALPGMVWQNRDVYLQGPIWAKIPHTDGNFHPSPLMGGFGLKHPPPQILIKNTPVPADPPTTFNQSKLNSFITQYSTGQVSVEIEWELQKENSKRWNPEIQYTSNYYKSNNVEFAVNTEGVYSEPRPIGTRYLTRNL

SEQ ID NO: 5199 - DNA, 2214 bp, synthetic construct
  source 1..2214: mol_type = other DNA
atggctgccgatggttatcttccagattggctcgaggacaaccttagtgaaggaattcgcgagtggtgggctttgaaacctggagcccctcaacccaaggcaaatcaacaacatcaagacaacgctcgaggtcttgtgcttccgggttacaaataccttggacccggcaacggactcgacaagggggagccggtcaacgcagcagacgcggcggccctcgagcacgacaaggcctacgaccagcagctgcaggcgggtgacaatccgtacctgcggtataaccacgccgacgccgagtttcaggagcgtctgcaagaagatacgtcttttgggggcaaccttggcagagcagtcttccaggccaaaaagaggatccttgagcctcttggtctggttgaggaagcagctaaaacggctcctggaaagaagaggcctgtagatcagtctcctcaggaaccggactcatcatctggtgttggcaaatcgggcaaacagcctgccagaaaaagactaaatttcggtcagactggcgactcagagtcagtcccagaccctcaacctctcggagaaccaccagcagcccccacaagtttgggatctaatacaatggcttcaggcggtggcgcaccaatggcagacaataacgagggtgccgatggggtgggtagttcctcgggaaattggcattgcgattcccaatggctgggggacagagtcatcaccaccagcacccgaacctgggccctgcccacctacaacaatcacctctacaagcaaatctccaacgggacatcgggaggagccaccaacgacaacacctacttcggctacagcaccccctgggggtattttgactttaacagattccactgccacttttcaccacgtgactggcagcgactcatcaacaacaactggggattccggcccaagagactcagcttcaagctcttcaacatccaggtcaaggaggtcacgcagaatgaaggcaccaagaccatcgccaataacctcaccagcaccatccaggtgtttacggactcggagtaccagctgccgtacgttctcggctctgcgcaccagggctgcctccctccgttcccggcggacgtgttcatgattccgcaatacggctacctgacgctcaacaatggcagccaagccgtgggacgttcatccttttactgcctggaatatttcccttctcagatgctgagaacgggcaacaactttaccttcagctacacctttgaggaagtgccttttcacagcagctacgcgcacagccagagcttggaccggctgatgaatcctctgattgaccagtacctgtactacttgtctcggactcaaacaacaggaggcacggcaaatacgcagactctgggcttcagccaaggtgggcctaatacaatggccaatcaggcaaagaactggctgccaggaccctgttaccgccaacaacgcgtctcaacgacaaccgggcaaaacaacaatagcaactttgcctggactgctgggaccaaataccatctgaatggaagaaattcattggctaatcctggcatcgctatggcaacacacaaagacgacgaggagcgtttttttcccagtaacgggatcctgatttttggcaaacaaaatgctgccagagacaatgcggattacagcgatgtcatgctcaccagcgaggaagaaatcaaaaccactaaccctgtggctacagaggaatacggtatcgtggcagataacttgcagcagcaaaacacggctcctcaaattggaactgtcaacagccagggggccttacccggtatggtctggcagaaccgggacgtgtacctgcagggtcccatctgggccaagattcctcacacggacggcaacttccacccgtctccgctgatgggcggctttggcctgaaacatcctccgcctcagatcctgatcaagaacacgcctgtacctgcggatcctccgaccaccttcaaccagtcaaagctgaactctttcatcacgcaatacagcaccggacaggtcagcgtggagatcgagtgggagctgcagaaggaaaacagcaagcgctggaacccggagatccagtacacttccaactattacaagtctaataatgttgaatttgctgttaatactgaaggtgtatatagtgaaccccgccccattggcaccagatacctgactcgtaatctgtaa

SEQ ID NO: 5200 - protein, 737 aa, synthetic construct; identical to SEQ ID NO: 5188

SEQ ID NO: 5201 - DNA, 2211 bp, synthetic construct
  source 1..2211: mol_type = other DNA
atggctgccgatggttatcttccagattggctcgaggacaacctctctgagggcattcgcgagtggtgggacttgaaacctggagcccctaaacccaaggcaaatcaacaacatcaggacaacgctcgaggtcttgtgcttccgggttacaaataccttggacccggcaacggactcgacaagggggagccggtcaacgcagcagacgcggcggccctcgagcacgacaaggcctacgaccagcagctcaaggccggagacaacccgtacctcaagtacaaccacgccgacgccgagttccaggagcggctcaaagaagatacgtcttttgggggcaacctcgggcgagcagtcttccaggccaaaaagaggcttcttgaacctcttggtctggttgaggaagcggctaagacggctcctggaaagaagagaccggtagagccatcaccccagcgttctccagactcctctacgggcatcggcaagaaaggccaacagcccgctaaaaagagactcaattttggtcagactggcgactcagagtcagtccccgacccacaacctctcggagaacctccagcaacccccgctgctgtgggacctactacaatggcttcaggcggtggcgcaccaatggcagacaataacgagggtgccgatggagtgggtaattcctcaggaaattggcattgcgattcccaatggctgggcgacagagtcatcaccaccagcaccagaacctgggccctgcccacttacaacaaccatctctacaagcaaatctccagccaatcaggagcttcaaacgacaaccactactttggctacagcaccccttgggggtattttgactttaacagattccactgccacttttcaccacgtgactggcaaagactcatcaacaacaactggggattccgacccaagagactcaacttcaagctcttcaacatccaagtcaaggaggtcacgacgaatgatggcgtcacgaccatcgctaataaccttaccagcacggttcaagtcttctcggactcggagtaccagttgccgtacgtcctcggctctgcgcaccagggctgcctccctccgttcccggcggacgtgttcatgattccgcagtacggctacctaacgctcaacaatggcagccaagccgtgggacgttcatccttttactgcctggaatatttcccttctcagatgctgagaacgggcaacaactttaccttcagctacacttttgaggacgttcctttccacagcagctacgctcacagccagagtctggaccgtctcatgaatcctctcatcgaccagtacctgtattacttgagcagaacaaacactccaagtggaaccaccacgcagtcaaggcttcagttttctcaggccggagcgagtgacattcgggaccagtctaggaactggcttcctggaccctgttaccgccagcagcgcgtttctaaaacaaaaacagacaacaacaacagcaattttacctggactggtgcttcaaaatataaccttaatgggcgtgaatctataatcaaccctggcactgctatggcctcacacaaagacgacgaagacaagttctttcccatgagcggtgtcatgatttttggaaaagagagcgccggagcttcaaacactgcattggacaatgtcatgattacagacgaagaggaaattaaagccactaaccctgtggccaccgaaagatttgggaccgtggcagtcaatttccagagcagcagcacagaccctgcgaccggagatgtgcatgctatgggagcattacctggcatggtgtggcaagatagagacgtgtacctgcagggtcccatttgggccaaaattcctcacacagatggacactttcacccgtctcctcttatgggcggctttggactcaagaacccgcctcctcagatcctcatcaaaaacacgcctgttcctgcgaatcctccggcggagttttcagctacaaagtttgcttcattcatcacccaatactccacaggacaagtgagtgtggaaattgaatgggagctgcagaaagaaaacagcaagcgctggaatcccgaagtgcagtacacatccaattatgcaaaatctgccaacgttgattttactgtggacaacaatggactttatactgagcctcgccccattggcacccgttaccttacccgtcccctgtaa

SEQ ID NO: 5202 - protein, 736 aa, synthetic construct
MAADGYLPDWLEDNLSEGIREWWDLKPGAPKPKANQQHQDNARGLVLPGYKYLGPGNGLDKGEPVNAADAAALEHDKAYDQQLKAGDNPYLKYNHADAEFQERLKEDTSFGGNLGRAVFQAKKRLLEPLGLVEEAAKTAPGKKRPVEPSPQRSPDSSTGIGKKGQQPAKKRLNFGQTGDSESVPDPQPLGEPPATPAAVGPTTMASGGGAPMADNNEGADGVGNSSGNWHCDSQWLGDRVITTSTRTWALPTYNNHLYKQISSQSGASNDNHYFGYSTPWGYFDFNRFHCHFSPRDWQRLINNNWGFRPKRLNFKLFNIQVKEVTTNDGVTTIANNLTSTVQVFSDSEYQLPYVLGSAHQGCLPPFPADVFMIPQYGYLTLNNGSQAVGRSSFYCLEYFPSQMLRTGNNFTFSYTFEDVPFHSSYAHSQSLDRLMNPLIDQYLYYLSRTNTPSGTTTQSRLQFSQAGASDIRDQSRNWLPGPCYRQQRVSKTKTDNNNSNFTWTGASKYNLNGRESIINPGTAMASHKDDEDKFFPMSGVMIFGKESAGASNTALDNVMITDEEEIKATNPVATERFGTVAVNFQSSSTDPATGDVHAMGALPGMVWQDRDVYLQGPIWAKIPHTDGHFHPSPLMGGFGLKNPPPQILIKNTPVPANPPAEFSATKFASFITQYSTGQVSVEIEWELQKENSKRWNPEVQYTSNYAKSANVDFTVDNNGLYTEPRPIGTRYLTRPL

SEQ ID NO: 5203 - DNA, 2211 bp, synthetic construct
  source 1..2211: mol_type = other DNA
atggctgccgatggttatcttccagattggctcgaggacaaccttagtgaaggaattcgcgagtggtgggcgctgaaacctggagccccgaagcccaaagccaaccagcaaaagcaggacgacggccggggtctggtgcttccgggttacaaatacctcggacccggtaacggactcgacaaaggagagccggtcaacgaggcggacgcggcagccctcgagcacgacaaggcctacgaccagcagctcaaagcgggtgacaatccgtacctgcggtataaccacgccgacgccgagtttcaggagcgtctgcaagaagatacgtcttttgggggcaacctcgggcgagcagtcttccaggccaagaagcgggttctcgaacctctcggtctggttgaggaaggcgctaagacggctcccggaaagaaacgtccggtagagcagtcgccacaagagccagactcctctacgggcatcggcaagaaaggccaacagcccgccagaaaaagactcaatttcggtcagactggcgactcagagtcagttccagaccctcaacctctcggagaacctccagcagcgccctctggtgtgggacctactacaatggcttcaggcggtggcgcaccaatggcagacaataacgaaggcgccgacggagtgggtaatgcctcaggaaattggcattgcgattccacatggctgggcgacagagtcatcaccaccagcacccgaacatgggccttgcccacctataacaaccacctctacaagcaaatctccagtgcttcaacgggggccagcaacgacaacacctacttcggctacagcaccccctgggggtattttgatttcaacagattccactgccatttctcaccacgtgactggcagcgactcatcaacaacaattggggattccggcccaagagactcaacttcaaactcttcaacatccaagtcaaggaggtcacgacgaatgatggcgtcacgaccatcgctaataaccttaccagcacggttcaagtcttctcggactcggagtaccagttgccgtacgtcctcggctctgcgcaccagggctgcctccctccgttcccggcggacgtgttcatgattccgcagtacggctacctaacgctcaacaatggcagccaggcagtgggacggtcatccttttactgcctggaatatttcccatcgcagatgctgagaacgggcaataactttaccttcagctacaccttcgaggacgtgcctttccacagcagctacgcgcacagccagagcctggaccggctgatgaatcctctcatcgaccagtacctgtattacctgaacagaactcagaatcagtccggaagtgcccaaaacaaggacttgctgtttagccgggggtctccagctggcatgtctgttcagcccaaaaactggctacctggaccctgttatcggcagcagcgcgtttctaaaacaaaaacagacaacaacaacagcaattttacctggactggtgcttcaaaatataacctcaatgggcgtgaatccatcatcaaccctggcactgctatggcctcacacaaagacgacgaagacaagttctttcccatgagcggtgtcatgatttttggaaaagagagcgccggagcttcaaacactgcattggacaatgtcatgattacagacgaagaggaaattaaagccactaaccctgtggccaccgaaagatttgggaccgtggcagtcaatttccagagcagcagcacagaccctgcgaccggagatgtgcatgttatgggagccttacctggaatggtgtggcaagacagagacgtatacctgcagggtcctatttgggccaaaattcctcacacagatggacactttcacccgtctcctcttatgggcggctttggactcaagaacccgcctcctcagatcctcatcaaaaacacgcctgttcctgcgaatcctccggcagagttttcggctacaaagtttgcttcattcatcacccagtattccacaggacaagtgagcgtggagattgaatgggagctgcagaaagaaaacagcaaacgctggaatcccgaagtgcagtatacatctaactatgcaaaatctgccaacgttgatttcactgtggacaacaatggactttatactgagcctcgccccattggcacccgttacctcacccgtcccctgtaa

SEQ ID NO: 5204 - protein, 736 aa, synthetic construct
MAADGYLPDWLEDNLSEGIREWWALKPGAPKPKANQQKQDDGRGLVLPGYKYLGPGNGLDKGEPVNEADAAALEHDKAYDQQLKAGDNPYLRYNHADAEFQERLQEDTSFGGNLGRAVFQAKKRVLEPLGLVEEGAKTAPGKKRPVEQSPQEPDSSTGIGKKGQQPARKRLNFGQTGDSESVPDPQPLGEPPAAPSGVGPTTMASGGGAPMADNNEGADGVGNASGNWHCDSTWLGDRVITTSTRTWALPTYNNHLYKQISSASTGASNDNTYFGYSTPWGYFDFNRFHCHFSPRDWQRLINNNWGFRPKRLNFKLFNIQVKEVTTNDGVTTIANNLTSTVQVFSDSEYQLPYVLGSAHQGCLPPFPADVFMIPQYGYLTLNNGSQAVGRSSFYCLEYFPSQMLRTGNNFTFSYTFEDVPFHSSYAHSQSLDRLMNPLIDQYLYYLNRTQNQSGSAQNKDLLFSRGSPAGMSVQPKNWLPGPCYRQQRVSKTKTDNNNSNFTWTGASKYNLNGRESIINPGTAMASHKDDEDKFFPMSGVMIFGKESAGASNTALDNVMITDEEEIKATNPVATERFGTVAVNFQSSSTDPATGDVHVMGALPGMVWQDRDVYLQGPIWAKIPHTDGHFHPSPLMGGFGLKNPPPQILIKNTPVPANPPAEFSATKFASFITQYSTGQVSVEIEWELQKENSKRWNPEVQYTSNYAKSANVDFTVDNNGLYTEPRPIGTRYLTRPL

SEQ ID NO: 5205 - DNA, 2205 bp, synthetic construct
  source 1..2205: mol_type = other DNA
atggctgctgacggttatcttccagattggctcgaggacaacctttctgaaggcattcgtgagtggtgggctctgaaacctggagtccctcaacccaaagcgaaccaacaacaccaggacaaccgtcggggtcttgtgcttccgggttacaaatacctcggacccggtaacggactcgacaaaggagagccggtcaacgaggcggacgcggcagccctcgaacacgacaaggcctacgaccagcagctcaaggccggagacaacccgtacctcaagtacaaccacgccgacgccgagttccaggagcggctcaaagaagatacgtcttttgggggcaacctcgggcgagcagtcttccaggccaaaaagaggcttcttgaacctcttggtctggttgaggaagcggctaagacggctcctggaaagaagaggcctgtagagcagtctcctcaggaaccggactcctccgcgggtattggcaaatcgggtgcacagcccgctaaaaagagactcaatttcggtcagactggcgacacagagtcagtcccagaccctcaaccaatcggagaacctcccgcagccccctcaggtgtgggatctcttacaatggcttcaggtggtggcgcaccagtggcagacaataacgaaggtgccgatggagtgggtagttcctcgggaaattggcattgcgattcccaatggctgggggacagagtcatcaccaccagcacccgaacctgggccctgcccacctacaacaaccacctctacaaacaaatttccagccaatcaggagcctcgaacgacaatcactactttggctacagcaccccttgggggtattttgacttcaacagattccactgccacttttcaccacgtgactggcagcgactcatcaacaacaactggggattccggcccaagagactcagcttcaagctcttcaacatccaggtcaaagaggttacggacaacaatggagtcaagaccatcgccaataaccttaccagcacggtccaggtcttcacggactcagactatcagctcccgtacgtgctcgggtcggctcacgagggctgcctcccgccgttcccagcggacgttttcatgattcctcagtacgggtatctgacgcttaatgatggaagccaggccgtgggtcgttcgtccttttactgcctggaatatttcccgtcgcaaatgctaagaacgggtaacaacttccagttcagctacgagtttgagaacgtacctttccatagcagctacgctcacagccaaagcctggaccgactaatgaatccactcatcgaccaatacttgtactatctctcaaagactattaacggttctggacagaatcaacaaacgctaaaattcagtgtggccggacccagcaacatggctgtccagggaagaaactacatacctggacccagctaccgacaacaacgtgtctcaaccactgtgactcaaaacaacaacagcgaatttgcttggcctggagcttcttcttgggctctcaatggacgtaatagcttgatgaatcctggacctgctatggccagccacaaagaaggagaggaccgtttctttcctttgtctggatctttaatttttggcaaacaaggaactggaagagacaacgtggatgcggacaaagtcatgataaccaacgaagaagaaattaaaactactaacccggtagcaacggagtcctatggacaagtggccacaaaccaccagagtgcccaagcacaggcgcagaccggctgggttcaaaaccaaggaatacttccgggtatggtttggcaggacagagatgtgtacctgcaaggacccatctgggccaagattcctcacacggacggcaacttccacccgtctccgctgatgggcggctttggcctgaaacatcctccgcctcagatcctgatcaagaacacgcctgtacctgcggatcctccgaccaccttcaaccagtcaaagctgaactctttcatcacgcaatacagcaccggacaggtcagcgtggaaattgaatgggagctgcagaaggaaaacagcaagcgctggaatcccgaagtgcagtatacatctaactatgcaaaatctgccaacgttgatttcactgtggacaacaatggactttatactgagcctcgccccattggcacccgttacctcacccgtcccctgtaa

SEQ ID NO: 5206 - protein, 734 aa, synthetic construct
MAADGYLPDWLEDNLSEGIREWWALKPGVPQPKANQQHQDNRRGLVLPGYKYLGPGNGLDKGEPVNEADAAALEHDKAYDQQLKAGDNPYLKYNHADAEFQERLKEDTSFGGNLGRAVFQAKKRLLEPLGLVEEAAKTAPGKKRPVEQSPQEPDSSAGIGKSGAQPAKKRLNFGQTGDTESVPDPQPIGEPPAAPSGVGSLTMASGGGAPVADNNEGADGVGSSSGNWHCDSQWLGDRVITTSTRTWALPTYNNHLYKQISSQSGASNDNHYFGYSTPWGYFDFNRFHCHFSPRDWQRLINNNWGFRPKRLSFKLFNIQVKEVTDNNGVKTIANNLTSTVQVFTDSDYQLPYVLGSAHEGCLPPFPADVFMIPQYGYLTLNDGSQAVGRSSFYCLEYFPSQMLRTGNNFQFSYEFENVPFHSSYAHSQSLDRLMNPLIDQYLYYLSKTINGSGQNQQTLKFSVAGPSNMAVQGRNYIPGPSYRQQRVSTTVTQNNNSEFAWPGASSWALNGRNSLMNPGPAMASHKEGEDRFFPLSGSLIFGKQGTGRDNVDADKVMITNEEEIKTTNPVATESYGQVATNHQSAQAQAQTGWVQNQGILPGMVWQDRDVYLQGPIWAKIPHTDGNFHPSPLMGGFGLKHPPPQILIKNTPVPADPPTTFNQSKLNSFITQYSTGQVSVEIEWELQKENSKRWNPEVQYTSNYAKSANVDFTVDNNGLYTEPRPIGTRYLTRPL

SEQ ID NO: 5207 - DNA, 2211 bp, synthetic construct
  source 1..2211: mol_type = other DNA
atggctgccgatggttatcttccagattggctcgaggacaacctctctgagggcattcgcgagtggtgggcgctgaaacctggagccccgaagcccaaagccaaccagcaaaagcaggacgacggccggggtctggtgcttcctggctacaagtacctcggacccttcaacggactcgacaagggggagcccgtcaacgcggcggacgcagcggccctcgagcacgacaaggcctacgaccagcagctgcaggcgggtgacaatccgtacctgcggtataaccacgccgacgccgagtttcaggagcgtctgcaagaagatacgtcttttgggggcaacctcgggcgagcagtcttccaggccaagaagtgggttctcgaacctctcggtctggttgaggaaggcgctaagacggctcctggaaagaaacgtccggtagagcagtcgccacaagagccagactcctcctcgggcatcggcaagacaggccagcagcccgctaaaaagagactcaattttggtcagactggcgactcagagtcagtccccgacccacaacctctcggagaacctccagcaacccccgctgctgtgggacctactacaatggcttcaggcggtggcgcaccaatggcagacaataacgaaggcgccgacggagtgggtaatgcctcaggaaattggcattgcgattccacatggctgggcgacagagtcatcaccaccagcacccgcacctgggccttgcccacctacaataaccacctctacaagcaaatctccagtgcttcaacgggggccagcaacgacaaccactacttcggctacagcaccccctgggggtattttgatttcaacagattccactgccatttctcaccacgtgactggcagcgactcatcaacaacaattggggattccggcccaagagactcaacttcaagctcttcaacatccaagtcaaggaggtcacgacgaatgatggcgtcacaaccatcgctaataaccttaccagcacggttcaagtcttctcggactcggagtaccagcttccgtacgtcctcggctctgcgcaccagggctgcctccctccgttcccggcggacgtgttcatgattccgcaatacggctacctgacgctcaacaatggcagccaagccgtgggacgttcatccttttactgcctggaatatttcccttctcagatgctgagaacgggcaacaactttaccttcagctacacctttgaggaagtgcctttccacagcagctacgcgcacagccagagcctggaccggctgatgaatcctctcatcgaccaatacctgtattacctgaacagaactcaaaatcagtccggaagtgcccaaaacaaggacttgctgtttagccgtgggtctccagctggcatgtctgttcagcccaaaaactggctacctggaccctgttatcggcagcagcgcgtttctaaaacaaaaacagacaacaacaacagcaattttacctggactggtgcttcaaaatataacctcaatgggcgtgaatccatcatcaaccctggcactgctatggcctcacacaaagacgacgaagacaagttctttcccatgagcggtgtcatgatttttggaaaggagagcgccggagcttcaaacactgcattggacaatgtcatgatcaccgacgaagaggaaatcaaagccactaaccccgtggccaccgaaagatttgggactgtggcagtcaatctccagagcagcagcacagaccctgcgaccggagatgtgcatgttatgggagccttacctggcatggtgtggcaagatagagacgtgtacctgcagggtcccatttgggccaaaattcctcacacagatggacactttcacccgtctcctcttatgggcggctttggactcaagaacccgcctcctcagatcctcatcaaaaacacgcctgttcctgcgaatcctccggcggagttttcagctacaaagtttgcttcattcatcacccaatactccacaggacaagtgagtgtggaaattgaatgggagctgcagaaagaaaacagcaagcgctggaatcccgaagtgcagtacacatccaattatgcaaaatctgccaacgttgattttactgtggacaacaatggactttatactgagcctcgccccattggcacccgttacctcacccgtcccctgtaa

SEQ ID NO: 5208 - protein, 736 aa, synthetic construct
MAADGYLPDWLEDNLSEGIREWWALKPGAPKPKANQQKQDDGRGLVLPGYKYLGPFNGLDKGEPVNAADAAALEHDKAYDQQLQAGDNPYLRYNHADAEFQERLQEDTSFGGNLGRAVFQAKKWVLEPLGLVEEGAKTAPGKKRPVEQSPQEPDSSSGIGKTGQQPAKKRLNFGQTGDSESVPDPQPLGEPPATPAAVGPTTMASGGGAPMADNNEGADGVGNASGNWHCDSTWLGDRVITTSTRTWALPTYNNHLYKQISSASTGASNDNHYFGYSTPWGYFDFNRFHCHFSPRDWQRLINNNWGFRPKRLNFKLFNIQVKEVTTNDGVTTIANNLTSTVQVFSDSEYQLPYVLGSAHQGCLPPFPADVFMIPQYGYLTLNNGSQAVGRSSFYCLEYFPSQMLRTGNNFTFSYTFEEVPFHSSYAHSQSLDRLMNPLIDQYLYYLNRTQNQSGSAQNKDLLFSRGSPAGMSVQPKNWLPGPCYRQQRVSKTKTDNNNSNFTWTGASKYNLNGRESIINPGTAMASHKDDEDKFFPMSGVMIFGKESAGASNTALDNVMITDEEEIKATNPVATERFGTVAVNLQSSSTDPATGDVHVMGALPGMVWQDRDVYLQGPIWAKIPHTDGHFHPSPLMGGFGLKNPPPQILIKNTPVPANPPAEFSATKFASFITQYSTGQVSVEIEWELQKENSKRWNPEVQYTSNYAKSANVDFTVDNNGLYTEPRPIGTRYLTRPL

SEQ ID NO: 5209 - DNA, 2214 bp, synthetic construct
  source 1..2214: mol_type = other DNA
atggctgccgatggttatcttccagattggctcgaggacaaccttagtgaaggaattcgcgagtggtgggctttgaaacctggagcccctcaacccaaggcaaatcaacaacatcaagacaacgctcgaggtcttgtgcttccgggttacaaataccttggacccggcaacggactcgacaagggggagccggtcaacgcagcagacgcggcggccctcgagcacgacaaggcctacgaccagcagctgcaggcgggtgacaatccgtacctgcggtataaccacgccgacgccgagtttcaggagcgtctgcaagaagatacgtcttttgggggcaaccttggcagagcagtcttccaggccaaaaagaggatccttgagcctcttggtctggttgaggaagcagctaaaacggctcctggaaagaagaggcctgtagatcagtctcctcaggaaccggactcatcatctggtgttggcaaatcgggcaaacagcctgccagaaaaagactaaatttcggtcagactggcgactcagagtcagtcccagaccctcaacctctcggagaaccaccagcagcccccacaagtttgggatctaatacaatggcttcaggcggtggcgcaccaatggcagacaataacgagggtgccgatggggtgggtagttcctcgggaaattggcattgcgattcccaatggctgggggacagagtcatcaccaccagcacccgaacctgggccctgcccacctacaacaatcacctctacaagcaaatctccaacgggacatcgggaggagccaccaacgacaacacctacttcggctacagcaccccctgggggtattttgactttaacagattccactgccacttttcaccacgtgactggcagcgactcatcaacaacaactggggattccggcccaagagactcagcttcaagctcttcaacatccaggtcaaggaggtcacgcagaatgaaggcaccaagaccatcgccaataacctcaccagcaccatccaggtgtttacggactcggagtaccagctgccgtacgttctcggctcggcgcaccagggctgcctccctccgttcccggcggacgtcttcatggtgccacagtatggatacctgacgctcaacaatggcagccaagccgtgggacgttcatccttttactgcctggaatatttcccttctcagatgctgagaacgggcaacaactttaccttcagctacacctttgaggaagtgcctttccacagcagctacgcgcacagccagagcttggaccggctgatgaatcctctgattgaccagtacctgtactacttgtctcggactcaaacaacaggaggcacggcaaatacgcagactctgggcttcagccaaggtgggcctaatacaatggccaatcaggcaaagaactggctgccaggaccctgttaccgccaacaacgcgtctcaacgacaaccgggcaaaacaacaatagcaactttgcctggactgctgggaccaaataccatctgaatggaagaaattcattggctaatcctggcatcgctatggcaacacacaaagacgacgaggagcgtttttttcccagtaacgggatcctgatttttggcaaacaaaatgctgccagagacaatgcggattacagcgatgtcatgctcaccagcgaggaagaaatcaaaaccactaaccctgtggctacagaggaatacggtatcgtggcagataacttgcagcagcaaaacacggctcctcaaattggaactgtcaacagccagggggacttacccggtatggtctggcagaaccgggacgtgtacctgcagggtcccatctgggccaagattcctcacacggacggcaacttccacccgtctccgctgatgggcggctttggcctgaaacatcctccgcctcagatcctgatcaagaacacgcctgtacctgcggatcctccgaccaccttcaaccagtcaaagctgaactctttcatcacgcaatacagcaccggacaggtcagcgtggagatcgagtgggagctgcagaaggaaaacagcaagcgctggaacccggagatccagtacacttccaactattacaagtctaataatgttgaatttgctgttaatactgaaggtgtatatagtgaaccccgccccattggcaccagatacctgactcgtaatctgtaa

SEQ ID NO: 5210 - protein, 737 aa, synthetic construct
MAADGYLPDWLEDNLSEGIREWWALKPGAPQPKANQQHQDNARGLVLPGYKYLGPGNGLDKGEPVNAADAAALEHDKAYDQQLQAGDNPYLRYNHADAEFQERLQEDTSFGGNLGRAVFQAKKRILEPLGLVEEAAKTAPGKKRPVDQSPQEPDSSSGVGKSGKQPARKRLNFGQTGDSESVPDPQPLGEPPAAPTSLGSNTMASGGGAPMADNNEGADGVGSSSGNWHCDSQWLGDRVITTSTRTWALPTYNNHLYKQISNGTSGGATNDNTYFGYSTPWGYFDFNRFHCHFSPRDWQRLINNNWGFRPKRLSFKLFNIQVKEVTQNEGTKTIANNLTSTIQVFTDSEYQLPYVLGSAHQGCLPPFPADVFMVPQYGYLTLNNGSQAVGRSSFYCLEYFPSQMLRTGNNFTFSYTFEEVPFHSSYAHSQSLDRLMNPLIDQYLYYLSRTQTTGGTANTQTLGFSQGGPNTMANQAKNWLPGPCYRQQRVSTTTGQNNNSNFAWTAGTKYHLNGRNSLANPGIAMATHKDDEERFFPSNGILIFGKQNAARDNADYSDVMLTSEEEIKTTNPVATEEYGIVADNLQQQNTAPQIGTVNSQGDLPGMVWQNRDVYLQGPIWAKIPHTDGNFHPSPLMGGFGLKHPPPQILIKNTPVPADPPTTFNQSKLNSFITQYSTGQVSVEIEWELQKENSKRWNPEIQYTSNYYKSNNVEFAVNTEGVYSEPRPIGTRYLTRNL

SEQ ID NO: 5211 - DNA, 2205 bp, synthetic construct
  source 1..2205: mol_type = other DNA
atggctgctgacggttatcttccagattggctcgaggacaacctttctgaaggcattcgtgagtggtgggctctgaaacctggagtccctcaacccaaagcgaaccaacaacaccaggacaactgtcggggtcttgtgcttccgggttacaaatacctcggacccggtaacggactcgacaaaggagagccggtcaacgaggcggacgcggcagccctcgaacacgacaaggcctacgaccagcagctcaaggccggagacaacccgtacctcaagtacaaccacgccgacgccgagttccaggagcggctcaaagaagatacgtcttttgggggcaacctcgggcgagcagtcttccagaccaaaaagaggcttcttgaacctcttggtctggttgaggaagcggctaagacggctcctggaaagaagaggcctgtagagcagtctcctcaggaaccggactcctccgcgggtattggcaaatcgggtgcacagcccgctaaaaagagactcaatttcggtcagactggcgacacagagtcagtcccagaccctcaaccaatcggagaacctcccgcagccccctcaggtgtgggatctcttacaatggcttcaggtggtggcgcaccagtggcagacaataacgaaggtgccgatggagtgggtagttcctcgggaaattggcattgcgattcccaatggctgggggacagagtcatcaccaccagcacccgaacctgggccctgcccacctacaacaaccacctctacaaacaaatttccagccaatcaggagcctcgaacgacaatcactactttggctacagcaccccttgggggtattttgacttcaacagattccactgccacttttcaccacgtgactggcagcgactcatcaacaacaactggggattccggcccaagagactcagcttcaagctcttcaacatccaggtcaaagaggttacggacaacaatggagtcaagaccatcgccaataaccttaccagcacggtccaggtcttcacggactcagactatcagctcccgtacgtgctcgggtcggctcacgagggctgcctcccgccgttcccagcggacgttttcatgattcctcagtacgggtatctgacgcttaatgatggaagccaggccgtgggtcgttcgtccttttactgcctggaatatttcccgtcgcaaatgctaagaacgggtaacaacttccagttcagctacgagtttgagaacgtacctttccatagcagctacgctcacagccaaagcctggaccgactaatgaatccactcatcgaccaatacttgtactatctctcaaagactattaacggttctggacagaatcaacaaacgctaaaattcagtgtggccggacccagcaacatggctgtccagggaagaaactacatacctggacccagctaccgacaacaacgtgtctcaaccactgtgactcaaaacaacaacagcgaatttgcttggcctggagcttcttcttgggctctcaatggacgtaatagcttgatgaatcctggacctgctatggccagccacaaagaaggagaggaccgtttctttcctttgtctggatctttaatttttggcaaacaaggaactggaagagacaacgtggatgcggacaaagtcatgataaccaacgaagaagaaattaaaactactaacccggtagcaacggagtcctatggacaagtggccacaaaccaccagagtgcccaagcacaggcgcagaccggctgggttcaaaaccaaggaatacttccgggtatggtttggcaggacagagatgtgtacctgcaaggacccatctgggccaagattcctcacacggacggcaacttccacccgtctccgctgatgggcggctttggcctgaaacatcctccgcctcagatcctgatcaagaacacgcctgttcctgcgaatcctccggcggagttttcagctacaaagtttgcttcattcatcacccagtactccacaggacaagtgagtgtggaaattgaatgggagctgcagaaagaaaacagcaagcgctggaatcccgaagtgcagtacacatccaattatgcaaaatctgccaacgttgattttactgtggacaacaatggactttatactgagcctcgccccattggcacccgttaccttaccaaacctctgtaa

SEQ ID NO: 5212 - protein, 734 aa, synthetic construct
MAADGYLPDWLEDNLSEGIREWWALKPGVPQPKANQQHQDNCRGLVLPGYKYLGPGNGLDKGEPVNEADAAALEHDKAYDQQLKAGDNPYLKYNHADAEFQERLKEDTSFGGNLGRAVFQTKKRLLEPLGLVEEAAKTAPGKKRPVEQSPQEPDSSAGIGKSGAQPAKKRLNFGQTGDTESVPDPQPIGEPPAAPSGVGSLTMASGGGAPVADNNEGADGVGSSSGNWHCDSQWLGDRVITTSTRTWALPTYNNHLYKQISSQSGASNDNHYFGYSTPWGYFDFNRFHCHFSPRDWQRLINNNWGFRPKRLSFKLFNIQVKEVTDNNGVKTIANNLTSTVQVFTDSDYQLPYVLGSAHEGCLPPFPADVFMIPQYGYLTLNDGSQAVGRSSFYCLEYFPSQMLRTGNNFQFSYEFENVPFHSSYAHSQSLDRLMNPLIDQYLYYLSKTINGSGQNQQTLKFSVAGPSNMAVQGRNYIPGPSYRQQRVSTTVTQNNNSEFAWPGASSWALNGRNSLMNPGPAMASHKEGEDRFFPLSGSLIFGKQGTGRDNVDADKVMITNEEEIKTTNPVATESYGQVATNHQSAQAQAQTGWVQNQGILPGMVWQDRDVYLQGPIWAKIPHTDGNFHPSPLMGGFGLKHPPPQILIKNTPVPANPPAEFSATKFASFITQYSTGQVSVEIEWELQKENSKRWNPEVQYTSNYAKSANVDFTVDNNGLYTEPRPIGTRYLTKPL

SEQ ID NO: 5213 - DNA, 2211 bp, synthetic construct
  source 1..2211: mol_type = other DNA
atggctgccgatggttatcttccagattggctcgaggacaacctctctgagggcattcgcgagtggtgggacttgaaacctggagcccctaaacccaaggcaaatcaacaacatcaggacaacgctcgaggtcttgtgcttccgggttacaaataccttggacccggcaacggactcgacaagggggagccggtcaacgcagcagacgcggcggccctcgagcacgacaaggcctacgaccagcagctcaaggccggagacaacccgtacctcaagtacaaccacgccgacgccgagttccaggagcggctcaaagaagatacgtcttttgggggcaacctcgggcgagcagtcttccaggccaaaaagaggcttcttgaacctcttggtctggttgaggaagcggctaagacggctcctggaaagaagagaccggtagagccatcaccccagcgttctccagactcctctacgggcatcggcaagaaaggccaacagcccgctaaaaagagactcaattttggtcagactggcgactcagagtcagtccccgacccacaacctctcggagaacctccagcaacccccgctgctgtgggacctactacaatggcttcaggcggtggcgcaccaatggcagacaataacgagggtgccgatggagtgggtaattcctcaggaaattggcattgcgattcccaatggctgggcgacagagtcatcaccaccagcaccagaacctgggccctgcccacttacaacaaccatctctacaagcaaatctccagccaatcaggagcttcaaacgacaaccactactttggctacagcaccccttgggggtattttgactttaacagattccactgccacttttcaccacgtgactggcaaagactcatcaacaacaactggggattccgacccaagagactcaacttcaagctcttcaacatccaagtcaaggaggtcacgacgaatgatggcgtcacgaccatcgctaataaccttaccagcacggttcaagtcttctcggactcggagtaccagttgccgtacgtcctcggctctgcgcaccagggctgcctccctccgttcccggcggacgtgttcatgattccgcagtacggctacctaacgctcaacaatggcagccaagccgtgggacgttcatccttttactgcctggaatatttcccttctcagatgctgagaacgggcaacaactttaccttcagctacacttttgaggacgttcctttccacagcagctacgctcacagccagagtctggaccgtctcatgaatcctctcatcgaccagtacctgtattacttgagcagaacaaacactccaagtggaaccaccacgcagtcaaggcttcagttttctcaggccggagcgagtgacattcgggaccagtctaggaactggcttcctggaccctgttaccgccagcagcgcgtttctaaaacaaaaacagacaacaacaacagcaattttacctggactggtgcttcaaaatataaccttaatgggcgtgaatctataatcaaccctggcactgctatggcctcacacaaagacgacgaagacaagttctttcccatgagcggtgtcatgatttttggaaaagagagcgccggagcttcaaacactgcattggacaatgtcatgatcacagacgaagaggaaatcaaagccactaaccccgtggccaccgaaagatttgggactgtggcagtcaatctccagagcagcagcacagaccctgcgaccggagatgtgcatgttatgggagcattacctggcatggtgtggcaagatagagacgtgtacctgcagggtcccatttgggccaaaattcctcacacagatggacactttcacccgtctcctcttatgggcggctttggactcaagaacccgcctcctcagatcctcatcaaaaacacgcctgttcctgcgaatcctccggcggagttttcagctacaaagtttgcttcattcatcacccaatactccacaggacaagtgagtgtggaaattgaatgggagctgcagaaagaaaacagcaagcgctggaatcccgaagtgcagtacacatccaattatgcaaaatctgccaacgttgattttactgtggacaacaatggactttatactgagcctcgccccattggcacccgttaccttacccgtcccctgtaa

SEQ ID NO: 5214 - protein, 736 aa, synthetic construct
MAADGYLPDWLEDNLSEGIREWWDLKPGAPKPKANQQHQDNARGLVLPGYKYLGPGNGLDKGEPVNAADAAALEHDKAYDQQLKAGDNPYLKYNHADAEFQERLKEDTSFGGNLGRAVFQAKKRLLEPLGLVEEAAKTAPGKKRPVEPSPQRSPDSSTGIGKKGQQPAKKRLNFGQTGDSESVPDPQPLGEPPATPAAVGPTTMASGGGAPMADNNEGADGVGNSSGNWHCDSQWLGDRVITTSTRTWALPTYNNHLYKQISSQSGASNDNHYFGYSTPWGYFDFNRFHCHFSPRDWQRLINNNWGFRPKRLNFKLFNIQVKEVTTNDGVTTIANNLTSTVQVFSDSEYQLPYVLGSAHQGCLPPFPADVFMIPQYGYLTLNNGSQAVGRSSFYCLEYFPSQMLRTGNNFTFSYTFEDVPFHSSYAHSQSLDRLMNPLIDQYLYYLSRTNTPSGTTTQSRLQFSQAGASDIRDQSRNWLPGPCYRQQRVSKTKTDNNNSNFTWTGASKYNLNGRESIINPGTAMASHKDDEDKFFPMSGVMIFGKESAGASNTALDNVMITDEEEIKATNPVATERFGTVAVNLQSSSTDPATGDVHVMGALPGMVWQDRDVYLQGPIWAKIPHTDGHFHPSPLMGGFGLKNPPPQILIKNTPVPANPPAEFSATKFASFITQYSTGQVSVEIEWELQKENSKRWNPEVQYTSNYAKSANVDFTVDNNGLYTEPRPIGTRYLTRPL

SEQ ID NO: 5215 - DNA, 2214 bp, synthetic construct; identical to SEQ ID NO: 5187
  source 1..2214: mol_type = other DNA

SEQ ID NO: 5216 - protein, 737 aa, synthetic construct; identical to SEQ ID NO: 5188

SEQ ID NO: 5217 - DNA, 2205 bp, synthetic construct
  source 1..2205: mol_type = other DNA
atggctgctgacggttatcttccagattggctcgaggacaacctttctgaaggcattcgtgagtggtgggctctgaaacctggagtccctcaacccaaagcgaaccaacaacaccaggacaaccgtcggggtcttgtgcttccgggttacaaatacctcggacccggtaacggactcgacaaaggagagccggtcaacgaggcggacgcggcagccctcgaacacgacaaggcctacgaccagcagctcaaggccggagacaacccgtacctcaagtacaaccacgccgacgccgagttccaggagcggctcaaagaagatacgtcttttgggggcaacctcgggcgagcagtcttccaggccaaaaagaggcttcttgaacctcttggtctggttgaggaagcggctaagacggctcctggaaagaagaggcctgtagagcagtctcctcaggaaccggactcctccgcgggtattggcaaatcgggtgcacagcccgctaaaaagagactcaatttcggtcagactggcgacacagagtcagtcccagaccctcaaccaatcggagaacctcccgcagccccctcaggtgtgggatctcttacaatggcttcaggtggtggcgcaccagtggcagacaataacgaaggtgccgatggagtgggtagttcctcgggaaattggcattgcgattcccaatggctgggggacagagtcatcaccaccagcacccgaacctgggccctgcccacctacaacaaccacctctacaaacaaatttccagccaatcaggagcctcgaacgacaatcactactttggctacagcaccccttgggggtattttgacttcaacagattccactgccacttttcaccacgtgactggcagcgactcatcaacaacaactggggattccggcccaagagactcagcttcaagctcttcaacatccaggtcaaagaggttacggacaacaatggagtcaagaccatcgccaataaccttaccagcacggtccaggtcttcacggactcagactatcagctcccgtacgtgctcgggtcggctcacgagggctgcctcccgccgttcccagcggacgttttcatgattcctcagtacgggtatctgacgcttaatgatggaagccaggccgtgggtcgttcgtccttttactgcctggaatatttcccgtcgcaaatgctaagaacgggtaacaacttccagttcagctacgagtttgagaacgtacctttccatagcagctacgctcacagccaaagcctggaccgactaatgaatccactcatcgaccaatacttgtactatctctcaaagactattaacggttctggacagaatcaacaaacgctaaaattcagtgtggccggacccagcaacatggctgtccagggaagaaactacatacctggacccagctaccgacaacaacgtgtctcaaccactgtgactcaaaacaacaacagcgaatttgcttggcctggagcttcttcttgggctctcaatggacgtaatagcttgatgaatcctggacctgctatggccagccacaaagaaggagaggaccgtttctttcctttgtctggatctttaatttttggcaaacaaggaactggaagagacaacgtggatgcggacaaagtcatgataaccaacgaagaagaaattaaaactactaacccggtagcaacggagtcctatggacaagtggccacaaaccaccagagtgcccaagcacaggcgcagaccggctgggttcaaaaccaaggaatacttccgggtatggtttggcaggacagagatgtgtacctgcaaggacccatttgggccaaaattcctcacacggacggcaactttcacccttctccgctgatgggagggtttggaatgaaacacccgcctcctcagatcctcatcaaaaacacacctgtacctgcggatcctccaacggccttcaacaaggacaagctgaactctttcatcacccagtattctactggccaagtcagcgtggagatcgagtgggagctgcagaaggaaaacagcaagcgctggaaccccgagatccagtacacctccaactactacaaatctacaagtgtggactttgctgttaatacagaaggcgtgtactctgaaccccgccccattggcacccgttacctcacccgtaatctgtaa

SEQ ID NO: 5218 - protein, 734 aa, synthetic construct
MAADGYLPDWLEDNLSEGIREWWALKPGVPQPKANQQHQDNRRGLVLPGYKYLGPGNGLDKGEPVNEADAAALEHDKAYDQQLKAGDNPYLKYNHADAEFQERLKEDTSFGGNLGRAVFQAKKRLLEPLGLVEEAAKTAPGKKRPVEQSPQEPDSSAGIGKSGAQPAKKRLNFGQTGDTESVPDPQPIGEPPAAPSGVGSLTMASGGGAPVADNNEGADGVGSSSGNWHCDSQWLGDRVITTSTRTWALPTYNNHLYKQISSQSGASNDNHYFGYSTPWGYFDFNRFHCHFSPRDWQRLINNNWGFRPKRLSFKLFNIQVKEVTDNNGVKTIANNLTSTVQVFTDSDYQLPYVLGSAHEGCLPPFPADVFMIPQYGYLTLNDGSQAVGRSSFYCLEYFPSQMLRTGNNFQFSYEFENVPFHSSYAHSQSLDRLMNPLIDQYLYYLSKTINGSGQNQQTLKFSVAGPSNMAVQGRNYIPGPSYRQQRVSTTVTQNNNSEFAWPGASSWALNGRNSLMNPGPAMASHKEGEDRFFPLSGSLIFGKQGTGRDNVDADKVMITNEEEIKTTNPVATESYGQVATNHQSAQAQAQTGWVQNQGILPGMVWQDRDVYLQGPIWAKIPHTDGNFHPSPLMGGFGMKHPPPQILIKNTPVPADPPTAFNKDKLNSFITQYSTGQVSVEIEWELQKENSKRWNPEIQYTSNYYKSTSVDFAVNTEGVYSEPRPIGTRYLTRNL

SEQ ID NO: 5219 - DNA, 2217 bp, synthetic construct
  source 1..2217: mol_type = other DNA
atggctgccgatggttatcttccagattggctcgaggacaacctctctgagggcattcgcgagtggtgggcgctgaaacctggagccccgaagcccaaagccaaccagcaaaagcaggacgacggccggggtctggtgcttcctggctacaagtacctcggacccttcaacggactcgacaagggggagcccgtcaacgcggcggacgcagcggccctcgagcacgacaaggcctacgaccagcagctgcaggcgggtgacaatccgtacctgcggtataaccacgccgacgccgagtttcaggagcgtctgcaagaagatacgtcttttgggggcaacctcgggcgagcagtcttccaggccaagaagcgggttctcgaacctctcggtctggttgaggaaggcgctaagacggctcctggaaagaagagaccggtagagccatcaccccagcgttctccagactcctctacgggcatcggcaagaaaggccaacagcccgccagaaaaagactcaattttggtcagactggcgactcagagtcagttccagaccctcaacctctcggagaacctccagcagcgccctctggtgtgggacctaatacaatggctgcaggcggtggcgcaccaatggcagacaataacgaaggcgccgacggagtgggtagttcctcgggaaattggcattgcgattccacatggctgggcgacagagtcatcaccaccagcacccgaacctgggccctgcccacctacaacaaccacctctacaagcaaatctccaacgggacatcgggaggagccaccaacgacaacacctacttcggctacagcaccccctgggggtattttgactttaacagattccactgccacttttcaccacgtgactggcagcgactcatcaacaacaactggggattccggcccaagagactcagcttcaagctcttcaacatccaggtcaaggaggtcacgcagaatgaaggcaccaagaccatcgccaataacctcaccagcaccatccaggtgtttacggactcggagtaccagctgccgtacgttctcggctctgcccaccagggctgcctgcctccgttcccggcggacgtgttcatgattccccagtacggctacctaacactcaacaacggtagtcaggccgtgggacgctcctccttctactgcctggaatactttccttcgcagatgctgagaaccggcaacaacttccagtttacttacaccttcgaggacgtgcctttccacagcagctacgcccacagccagagcttggaccggctgatgaatcctctgattgaccagtacctgtactacttgtctcggactcaaacaacaggaggcacggcaaatacgcagactctgggcttcagccaaggtgggcctaatacaatggccaatcaggcaaagaactggctgccaggaccctgttaccgccaacaacgcgtctcaacgacaaccgggcaaaacaacaatagcaactttgcctggactgctgggaccaaataccatctgaatggaagaaattcattggctaatcctggcatcgctatggcaacacacaaagacgacgaggagcgtttttttcccagtaacgggatcctgatttttggcaaacaaaatgctgccagagacaatgcggattacagcgatgtcatgctcaccagcgaggaagaaatcaaaaccactaaccctgtggctacagaggaatacggtatcgtggcagataacttgcagcagcaaaacacggctcctcaaattggaactgtcaacagccagggggccttacccggtatggtctggcagaaccgggacgtgtacctgcagggtcccatctgggccaagattcctcacacggacggcaacttccacccctctcccctcatgggtggattcggacttaaacatcctccgcctcagatcctgatcaagaacacgcctgtacctgcggatcctccgaccaccttcaaccagtcaaagctgaactctttcatcacgcaatacagcaccggacaggtcagcgtggaaattgaatgggagctgcagaaggaaaacagcaagcgctggaaccccgagatccagtacacctccaactactacaaatctacaagtgtggactttgctgttaatacagaaggcgtgtactctgaaccccgccccattggcacccgttacctcacccgtaatctgtaa

SEQ ID NO: 5220 - protein, 738 aa, synthetic construct; identical to SEQ ID NO: 5122

SEQ ID NO: 5221 - DNA, 2211 bp, synthetic construct
  source 1..2211: mol_type = other DNA
atggctgctgacggttatcttccagattggctcgaggacaacctttctgaaggcattcgagagtggtgggcgctgcaacctggagcccctaaacccaaggcaaatcaacaacatcaggacaacgctcggggtcttgtgcttccgggttacaaatacctcggacccggcaacggactcgacaagggggaacccgtcaacgcagcggacgcggcagccctcgagcacgacaaggcctacgaccagcagctcaaggccggtgacaacccctacctcaagtacaaccacgccgacgccgagttccaggagcggctcaaagaagatacgtcttttgggggcaacctcgggcgagcagtcttccaggccaaaaagaggcttcttgaacctcttggtctggttgaggaagcggctaagacggctcctggaaagaagaggcctgtagatcagtctcctcaggaaccggactcatcatctggtgttggcaaatcgggcaaacagcctgccagaaaaagactaaatttcggtcagactggcgactcagagtcagtcccagaccctcaacctctcggagaaccaccagcagcccccacaagtttgggatctaatacaatggcttcaggcggtggcgcaccaatggcagacaataacgagggtgccgatggagtgggtaattcctcaggaaattggcattgcgattcccaatggctgggcgacagagtcatcaccaccagcaccagaacctgggccctgcccacttacaacaaccatctctacaagcaaatctccagccaatcaggagcttcaaacgacaaccactactttggctacagcaccccttgggggtattttgactttaacagattccactgccacttctcaccacgtgactggcagcgactcattaacaacaactggggattccggcccaagaaactcagcttcaagctcttcaacatccaagttaaagaggtcacgcagaacgatggcacgacgactattgccaataaccttaccagcacggttcaggtgtttacggactcggagtatcagctcccgtacgtgctcgggtcggcgcaccaaggctgtctcccgccgtttccagcggacgtcttcatggtccctcagtatggatacctcaccctgaacaacggaagtcaagcggtgggacgctcatccttttactgcctggagtacttcccttcgcagatgctaaggactggaaataacttccaattcagctataccttcgaggatgtaccttttcacagcagctacgctcacagccagagtttggatcgcttgatgaatcctcttattgatcagtatctgtactacctgaacagaacgcaaggaacaacctctggaacaaccaaccaatcacggctgctttttagccaggctgggcctcagtctatgtctttgcaggccagaaattggctacctgggccctgctaccggcaacagagactttcaaagactgctaacgacaacaacaacagtaactttccttggacagcggccagcaaatatcatctcaatggccgcgactcgctggtgaatccaggaccagctatggccagtcacaaggacgatgaagaaaaatttttccctatgcacggcaatctaatatttggcaaagaagggacaacggcaagtaacgcagaattagataatgtaatgattacggatgaagaagagattcgtaccaccaatcctgtggcaacagagcagtatggaactgtggcaaataacttgcagagctcaaatacagctcccacgactagaactgtcaatgatcagggggccttacctggcatggtgtggcaagatcgtgacgtgtaccttcaaggacctatctgggcaaagattcctcacacggatggacactttcatccttctcctctgatgggaggctttggactgaaacatccgcctcctcaaatcatgatcaaaaatactccggtaccggcaaatcctccgacgactttcagcccggccaagtttgcttcatttatcactcagtactccactggacaggtcagcgtggaaattgagtgggagctacagaaagaaaacagcaaacgttggaatccagagattcagtacacttccaactacaacaagtctgttaatgtggactttactgtagacactaatggtgtttatagtgaacctcgccccattggcacccgttaccttacccgtcccctgtaa

SEQ ID NO: 5222 - protein, 736 aa, synthetic construct; identical to SEQ ID NO: 5192

SEQ ID NO: 5223 - DNA, 2211 bp, synthetic construct; identical to SEQ ID NO: 5191
  source 1..2211: mol_type = other DNA

SEQ ID NO: 5224 - protein, 736 aa, synthetic construct; identical to SEQ ID NO: 5192

SEQ ID NO: 5225 - DNA, 2211 bp, synthetic construct
  source 1..2211: mol_type = other DNA
atggctgctgacggttatcttccagattggctcgaggacaacctttctgaaggcattcgtgagtggtgggctctgaaacctggagtccctcaacccaaagcgaaccaacaacaccaggacaaccgtcggggtcttgtgcttccgggttacaaatacctcggacccggtaacggactcgacaaaggagagcccgtcaacgcggcggatgcagcggccctcgagcacgacaaggcctacgaccagcagctcaaagcgggtgacaatccgtacctgcggtataaccacgccgacgccgagtttcaggagcgtctgcaagaagatacgtcttttgggggcaacctcgggcgagcagtcttccaggccaagaagagggttctcgaaccttttggtctggttgaggaaggtgctaagacggctcctggaaagaaacgtccggtagagcagtcgccacaagagccagactcctcctcgggcatcggcaagacaggccagcagcccgctaaaaagagactcaattttggtcagactggcgactcagagtcagtccccgacccacaacctctcggagaacctccagcaacccccgctgctgtgggacctactacaatggcttcaggcggtggcgcaccaatggcagacaataacgaaggcgccgacggagtgggtaatgcctcaggaaattggcattgcgattccacatggctgggcgacagagtcatcaccaccagcacccgcacctgggccttgcccacctacaataaccacctctacaagcaaatctccagtgcttcaacgggggccagcaacgacaaccactacttcggctacagcaccccctgggggtattttgatttcaacagattccactgccatttctcaccacgtgactggcagcgactcatcaacaacaattggggattccggcccaagagactcaacttcaagctcttcaacatccaagtcaaggaggtcacgacgaatgatggcgtcacgaccatcgctaataaccttaccagcacggttcaagtcttctcggactcggagtaccagcttccgtacgtcctcggctctgcgcaccagggctgcctccctccgttcccggcggacgtgttcatgattccgcaatacggctacctgacgctcaacaatggcagccaagccgtgggacgttcatccttttactgcctggaatatttcccttctcagatgctgagaacgggcaacaactttaccttcagctacacctttgaggaagtgcctttccacagcagctacgcgcacagccagagcctggaccggctgatgaatcctctcatcgaccaatacctgtattacctgaacagaactcaaaatcagtccggaagtgcccaaaacaaggacttgctgtttagccgtgggtctccagctggcatgtctgttcagcccaaaaactggctacctggaccctgttatcggcagcagcgcgtttctaaaacaaaaacagacaacaacaacagcaattttacctggactggtgcttcaaaatataacctcaatgggcgtgaatccatcatcaaccctggcactgctatggcctcacacaaagacgacgaagacaagttctttcccatgagcggtgtcatgatttttggaaaagagagcgccggagcttcaaacactgcattggacaatgtcatgattacagacgaagaggaaattaaagccactaaccctgtggccaccgaaagatttgggaccgtggcagtcaatttccagagcagcagcacagaccctgcgaccggagatgtgcatgttatgggagccttacctggaatggtgtggcaagacagagacgtatacctgcagggtcctatttgggccaaaattcctcacacggatggacactttcacccgtctcctctcatgggcggctttggacttaagcacccgcctcctcagatcctcatcaaaaacacgcctgttcctgcgaatcctccggcagagttttcggctacaaagtttgcttcattcatcacccagtattccacaggacaagtgagcgtggagattgaatgggagctgcagaaagaaaacagcaaacgctggaatcccgaagtgcagtatacatctaactatgcaaaatctgccaacgttgatttcactgtggacaacaatggactttatactgagcctcgccccattggcacccgttacctcacccgtcccctgtaa

SEQ ID NO: 5226 - protein, 736 aa, synthetic construct
MAADGYLPDWLEDNLSEGIREWWALKPGVPQPKANQQHQDNRRGLVLPGYKYLGPGNGLDKGEPVNAADAAALEHDKAYDQQLKAGDNPYLRYNHADAEFQERLQEDTSFGGNLGRAVFQAKKRVLEPFGLVEEGAKTAPGKKRPVEQSPQEPDSSSGIGKTGQQPAKKRLNFGQTGDSESVPDPQPLGEPPATPAAVGPTTMASGGGAPMADNNEGADGVGNASGNWHCDSTWLGDRVITTSTRTWALPTYNNHLYKQISSASTGASNDNHYFGYSTPWGYFDFNRFHCHFSPRDWQRLINNNWGFRPKRLNFKLFNIQVKEVTTNDGVTTIANNLTSTVQVFSDSEYQLPYVLGSAHQGCLPPFPADVFMIPQYGYLTLNNGSQAVGRSSFYCLEYFPSQMLRTGNNFTFSYTFEEVPFHSSYAHSQSLDRLMNPLIDQYLYYLNRTQNQSGSAQNKDLLFSRGSPAGMSVQPKNWLPGPCYRQQRVSKTKTDNNNSNFTWTGASKYNLNGRESIINPGTAMASHKDDEDKFFPMSGVMIFGKESAGASNTALDNVMITDEEEIKATNPVATERFGTVAVNFQSSSTDPATGDVHVMGALPGMVWQDRDVYLQGPIWAKIPHTDGHFHPSPLMGGFGLKHPPPQILIKNTPVPANPPAEFSATKFASFITQYSTGQVSVEIEWELQKENSKRWNPEVQYTSNYAKSANVDFTVDNNGLYTEPRPIGTRYLTRPL

SEQ ID NO: 5227 - DNA, 2217 bp, synthetic construct
  source 1..2217: mol_type = other DNA
atggctgccgatggttatcttccagattggctcgaggacaacctctctgagggcattcgcgagtggtgggacttgaaacctggagccccgaaacccaaagccaaccagcaaaagcaggacgacggccggggtctggtgcttcctggctacaagtacctcggacccttcaacggactcgacaagggggagcccgtcaacgcggcggatgcaacggccctcgagcacgacaaggcctacgaccagcagctgcaggcgggtgacaatccgtacctgcggtataaccacgccgacgccgagtttcaggagcgtctgcaagaagatacgtcttttgggggcaacctcgggcgagcagtcttccaggccaagaagcgggttctcgaacctctcggtctggttgaggaaggcgctaagacggctcctggaaagaagagaccggtagagccatcaccccagcgttctccagactcctctacgggcatcggcaagaaaggccaacagcccgccagaaaaagactcaattttggtcagactggcgactcagagtcagttccagaccctcaacctctcggagaaccaccagcagcccccacaagtttgggatctaatacaatggcttcaggcggtggcgcaccaatggcagacaataacgagggtgccgatggagtgggtaattcctcaggaaattggcattgcgattcccaatggctgggcgacagagtcatcaccaccagcacccgcacctgggccttgcccacctacaataaccacctctacaagcaaatctccagtgcttcaacgggggccagcaacgacaaccactacttcggctacagcaccccctgggggtattttgactttaaccgcttccactgccacttctcgccaagagactggcaaagactcatcaacaacaattggggattccggcccaagagactcaacttcaaactcttcaacatccaagtcaaggaggtcacgacgaatgatggcgtcacgaccatcgccaataacctcaccagcaccatccaggtgtttacggactcggagtaccagctgccgtacgttctcggctctgcccaccagggctgcctgcctccgttcccggcggacgtgttcatgattccccagtatggatacctcaccctgaacaacggaagtcaagcggtgggacgctcatccttttactgcctggagtacttcccttcgcagatgctaaggactggaaataacttccaattcagctataccttcgaggatgtaccttttcacagcagctacgctcacagccagagtttggatcgcttgatgaatcctcttattgatcagtatctgtactacctgaacagaacgcaaggaacaacctctggaacaaccaaccaatcacggctgctttttagccaggctgggcctcagtctatgtctttgcaggccagaaattggctacctgggccctgctaccggcaacagagactttcaaagactgctaacgacaacaacaacagtaactttccttggacagcagccagcaaatatcatctcaatggccgcgactcgctggtgaatccaggaccagctatggccagtcacaaggacgatgaagaaaaatttttccctatgcacggcaatctaatatttggcaaagaagggacaacggcaagtaacgcagaattagataatgtaatgattacggatgaagaagagattcgtaccaccaatcctgtggcaacagagcagtatggaactgtggcaaataacttgcagagctcaaatacagctcccacgactagaactgtcaatgatcagggggccttacctggcatggtgtggcaagatcgtgacgtgtaccttcaggggcccatctgggcaaagattccacacacggacggacattttcacccctctcccctcatgggtggattcggacttaaacaccctcctccgcagattctcatcaagaacaccccggtacctgcgaatccttcgaccaccttcagtgcggcaaagtttgcttccttcatcacacagtactccacgggacaggtcagcgtggagatcgagtgggagctgcagaaggaaaacagcaagcgctggaacccggagatccagtacacttccaactattacaagtctaataatgttgaatttgctgttaatactgaaggtgtatatagtgaaccccgccccattggcaccagatacctgactcgtaatctgtaa

SEQ ID NO: 5228 - protein, 738 aa, synthetic construct
MAADGYLPDWLEDNLSEGIREWWDLKPGAPKPKANQQKQDDGRGLVLPGYKYLGPFNGLDKGEPVNAADATALEHDKAYDQQLQAGDNPYLRYNHADAEFQERLQEDTSFGGNLGRAVFQAKKRVLEPLGLVEEGAKTAPGKKRPVEPSPQRSPDSSTGIGKKGQQPARKRLNFGQTGDSESVPDPQPLGEPPAAPTSLGSNTMASGGGAPMADNNEGADGVGNSSGNWHCDSQWLGDRVITTSTRTWALPTYNNHLYKQISSASTGASNDNHYFGYSTPWGYFDFNRFHCHFSPRDWQRLINNNWGFRPKRLNFKLFNIQVKEVTTNDGVTTIANNLTSTIQVFTDSEYQLPYVLGSAHQGCLPPFPADVFMIPQYGYLTLNNGSQAVGRSSFYCLEYFPSQMLRTGNNFQFSYTFEDVPFHSSYAHSQSLDRLMNPLIDQYLYYLNRTQGTTSGTTNQSRLLFSQAGPQSMSLQARNWLPGPCYRQQRLSKTANDNNNSNFPWTAASKYHLNGRDSLVNPGPAMASHKDDEEKFFPMHGNLIFGKEGTTASNAELDNVMITDEEEIRTTNPVATEQYGTVANNLQSSNTAPTTRTVNDQGALPGMVWQDRDVYLQGPIWAKIPHTDGHFHPSPLMGGFGLKHPPPQILIKNTPVPANPSTTFSAAKFASFITQYSTGQVSVEIEWELQKENSKRWNPEIQYTSNYYKSNNVEFAVNTEGVYSEPRPIGTRYLTRNL

SEQ ID NO: 5229 - DNA, 2208 bp, synthetic construct
  source 1..2208: mol_type = other DNA
atggctgccgatggttatcttccagattggctcgaggacaaccttagtgaaggaattcgcgagtggtgggacttgaaacctggagccccgaagcccaaagccaaccagcaaaagcaggacgacggccggggtctggtgcttcctggctacaagtacctcggacccttcaacggactcgacaagggggagcccgtcaacgcggcggacgcagcggccctcgagcacgacaaggcctacgaccagcagctcaaagcgggtgacaatccgtacctgcggtataaccacgccgacgccgagtttcaggagcgtctgcaagaagatacgtcttttgggggcaacctcgggcgagcagtcttccaggccaagaagcgggttctcgaacctctcggtctggttgaggaaggtgctaagacggctcctggaaagaaacgtccggtagagcagtcgccacaagagccagactcctcctcgggcattggcaagacaggccagcagcccgctaaaaagagactcaattttggtcagactggcgactcagagtcagtccccgacccacaacctctcggagaacctccagcaacccccgctgctgtgggacctactacaatggcttcaggcggtggcgcaccaatggcagacaataacgaaggcgccgacggagtgggtaatgcctcaggaaattggcattgcgattccacatggctgggcgacagagtcatcaccaccagcacccgaacctgggccctgcccacctacaacaaccacctctacaaacaaatttccagccaatcaggagcctcgaacgacaatcactactttggctacagcaccccttgggggtattttgatttcaacagattccactgccacttttcaccacgtgactggcagcgactcatcaacaacaattggggattccggcccaagagactcagcttcaagctcttcaacatccaggtcaaggaggtcacgcagaatgaaggcaccaagaccatcgccaataaccttaccagcacggttcaagtgtttacggactcggagtatcagctcccgtacgtgctcggctcggcgcatcaaggatgcctcccgccgttcccagcagacgtcttcatggtgccacagtatggatacctcaccctgaacaacgggagtcaggcagtaggacgctcttcattttactgcctggagtactttccttctcagatgctgcgtaccggaaacaactttaccttcagctacacttttgaggacgttcctttccacagcagctacgctcacagccagagtctggaccgtctcatgaatcctctgattgaccagtacctgtattacttgagcagaacaaacactccaagtggaaccaccacgcagtcaaggcttcagttttctcaggccggagcgagtgacattcgggaccagtctaggaactggcttcctggaccctgttaccgccagcagcgagtatcaaagacatctgcggataacaacaacagtgaatactcgtggactggagctaccaagtaccacctcaatggcagagactctctggtgaatccgggcccggccatggcaagccacaaggactatgaagaaaagttttttcctcagagcggggttctcatctttgggaagcaaggctcagagaaaacaaatgtggacattgaaaaggtcatgattacagacgaagaggaaatcaggacaaccaatcccgtggctacggagcagtatggttctgtatctaccaacctccagagaggcaacagacaagcagctaccgcagatgtcaacacacaaggcgttcttccaggcatggtctggcaggacagagatgtgtaccttcaggggcccatctgggcaaagattccacacacggacggacattttcacccgtctccgctgatgggcggctttggcctgaaacatcctccgcctcagatcctgatcaagaacacgcctgtacctgcggatcctccgaccaccttcaaccagtcaaagctgaactctttcatcactcagtattctactggccaagtcagcgtggagatcgagtgggagctgcagaaggaaaacagcaagcgctggaaccccgagatccagtacacctccaactactacaaatctacaagtgtggactttgctgttaatacagaaggcgtgtactctgaaccccgccccattggcacccgttacctcacccgtaatctgtaa

SEQ ID NO: 5230 - protein, 735 aa, synthetic construct
MAADGYLPDWLEDNLSEGIREWWDLKPGAPKPKANQQKQDDGRGLVLPGYKYLGPFNGLDKGEPVNAADAAALEHDKAYDQQLKAGDNPYLRYNHADAEFQERLQEDTSFGGNLGRAVFQAKKRVLEPLGLVEEGAKTAPGKKRPVEQSPQEPDSSSGIGKTGQQPAKKRLNFGQTGDSESVPDPQPLGEPPATPAAVGPTTMASGGGAPMADNNEGADGVGNASGNWHCDSTWLGDRVITTSTRTWALPTYNNHLYKQISSQSGASNDNHYFGYSTPWGYFDFNRFHCHFSPRDWQRLINNNWGFRPKRLSFKLFNIQVKEVTQNEGTKTIANNLTSTVQVFTDSEYQLPYVLGSAHQGCLPPFPADVFMVPQYGYLTLNNGSQAVGRSSFYCLEYFPSQMLRTGNNFTFSYTFEDVPFHSSYAHSQSLDRLMNPLIDQYLYYLSRTNTPSGTTTQSRLQFSQAGASDIRDQSRNWLPGPCYRQQRVSKTSADNNNSEYSWTGATKYHLNGRDSLVNPGPAMASHKDYEEKFFPQSGVLIFGKQGSEKTNVDIEKVMITDEEEIRTTNPVATEQYGSVSTNLQRGNRQAATADVNTQGVLPGMVWQDRDVYLQGPIWAKIPHTDGHFHPSPLMGGFGLKHPPPQILIKNTPVPADPPTTFNQSKLNSFITQYSTGQVSVEIEWELQKENSKRWNPEIQYTSNYYKSTSVDFAVNTEGVYSEPRPIGTRYLTRNL

SEQ ID NO: 5231 - DNA, 2214 bp, synthetic construct
  source 1..2214: mol_type = other DNA
atggctgccgatggttatcttccagattggctcgaggacaacctctctgagggcattcgcgagtggtgggacttgaaacctggagccccgaaacccaaagccaaccagcaaaagcaggacgacggccggggtctggtgcttcctggctacaagtacctcggacccttcaacggactcgacaagggggagcccgtcaacgcggcggatgcagcggccctcgagcacgacaaggcctacgaccagcagctcaaagcgggtgacaatccgtacctgcggtataaccacgccgacgccgagtttcaggagcgtctgcaagaagatacgtcttttgggggcaacctcgggcgagcagtcttccaggccaagaagagggttctcgaaccttttggtctggttgaggaaggtgctaagacggctcctggaaagaaacgtccggtagagcagtcgccacaagagccagactcctcctcgggcattggcaagacaggccagcagcctgcaagaaaaagattgaattttggtcagactggagacgcagactcagtacctgacccccagcctctcggacagccaccagcagccccctctggtctgggaactaatacgatggctacaggcagtggcgcaccaatggcagacaataacgagggcgccgacggagtgggtaattcctcgggaaattggcattgcgattcccaatggctgggggacagagtcatcaccaccagcacccgaacctgggccctgcccacctacaacaatcacctctacaagcaaatctccaacagcacatctggaggatcttcaaatgacaacgcctacttcggctacagcaccccctgggggtattttgatttcaacagattccactgccatttctcaccacgtgactggcagcgactcatcaacaacaattggggattccggcccaagagactcaacttcaagctcttcaacatccaggtcaaggaggtcacgcagaatgaaggcaccaagaccatcgccaataacctcaccagcaccatccaggtgtttacggactcggagtaccagctgccgtacgttctcggctctgcccaccagggctgcctgcctccgttcccggcggacgtgttcatgattccccagtacggctacctaacactcaacaacggtagtcaggccgtgggacgctcctccttctactgcctggaatactttccttcgcagatgctgagaaccggcaacaacttccagtttacttacaccttcgaggacgtgcctttccacagcagctacgcccacagccagagcttggaccggctgatgaatcctctgattgaccagtacctgtactacttgtctcggactcaaacaacaggaggcacgacaaatacgcagactctgggcttcagccaaggtgggcctaatacaatggccaatcaggcaaagaactggctgccaggaccctgttaccgccagcagcgagtatcaaagacatttgcggataacaacaacagtgaatactcgtggactggagctaccaagtaccacctcaatggcagagactctctggtgaatccgggcccggccatggcaagccacaaggacgatgaagaaaagttttttcctcagagcggggttctcatctttgggaagcaaggctcagagaaaacaaatgtggacattgaaaaggtcatgattacagacgaagaggaaatcaggacaaccaatcccgtggctacggagcagtatggttctgtatctaccaacctccagagaggcaacagacaagcagctaccgcagatgtcaacacacaaggcgttcttccaggcatggtctggcaggacagagatgtgtaccttcaggggcccatctgggcaaagattccacacacggacggacattttcacccctctcccctcatgggtggattcggacttaaacaccctccgcctcagatcctgatcaagaacacgcctgtacccgcggatcctccgaccaccttcaaccagtcaaagctgaactctttcatcacccagtattctactggccaagtcagcgtggagatcgagtgggagctgcagaaggaaaacagcaagcgctggaaccccgagatccagtacacctccaactactacaaatctacaagtgtggactttgctgttaatacagaaggcgtgtactctgaaccccgccccattggcacccgttacctcacccgtaatctgtaa

SEQ ID NO: 5232 - protein, 737 aa, synthetic construct
MAADGYLPDWLEDNLSEGIREWWDLKPGAPKPKANQQKQDDGRGLVLPGYKYLGPFNGLDKGEPVNAADAAALEHDKAYDQQLKAGDNPYLRYNHADAEFQERLQEDTSFGGNLGRAVFQAKKRVLEPFGLVEEGAKTAPGKKRPVEQSPQEPDSSSGIGKTGQQPARKRLNFGQTGDADSVPDPQPLGQPPAAPSGLGTNTMATGSGAPMADNNEGADGVGNSSGNWHCDSQWLGDRVITTSTRTWALPTYNNHLYKQISNSTSGGSSNDNAYFGYSTPWGYFDFNRFHCHFSPRDWQRLINNNWGFRPKRLNFKLFNIQVKEVTQNEGTKTIANNLTSTIQVFTDSEYQLPYVLGSAHQGCLPPFPADVFMIPQYGYLTLNNGSQAVGRSSFYCLEYFPSQMLRTGNNFQFTYTFEDVPFHSSYAHSQSLDRLMNPLIDQYLYYLSRTQTTGGTTNTQTLGFSQGGPNTMANQAKNWLPGPCYRQQRVSKTFADNNNSEYSWTGATKYHLNGRDSLVNPGPAMASHKDDEEKFFPQSGVLIFGKQGSEKTNVDIEKVMITDEEEIRTTNPVATEQYGSVSTNLQRGNRQAATADVNTQGVLPGMVWQDRDVYLQGPIWAKIPHTDGHFHPSPLMGGFGLKHPPPQILIKNTPVPADPPTTFNQSKLNSFITQYSTGQVSVEIEWELQKENSKRWNPEIQYTSNYYKSTSVDFAVNTEGVYSEPRPIGTRYLTRNL

SEQ ID NO: 5233 - DNA, 2217 bp, synthetic construct
  source 1..2217: mol_type = other DNA
atggctgccgatggttatcttccagattggctcgaggacactctctctgaaggaataagacagtggtgggcgctgaaacctggagccccgaagcccaaagccaaccagcaaaagcaggacgacggccggggtctggtgcttcctggctacaagtacctcggacccttcaacggactcgacaagggggagcccgtcaacgcggcggatgcagcggccctcgagcacgacaaggcctacgaccagcagctcaaagcgggtgacaatccgtacctgcggtataaccacgccgacgccgagtttcaggagcgtctgcaagaagatacgtcttttgggggcaacctcgggcgagcagtcttccaggccaagaagcgggttctcgaacctctcggtctggttgaggaaggcgctaagacggctcctggaaagaagagaccggtagagccatcaccccagcgttctccagactcctctacgggcatcggcaagaaaggccaacagcccgccagaaaaagactcaattttggtcagactggcgactcagagtcagttccagaccctcaacctctcggagaaccaccagcagcccccacaagtttgggatctaatacaatggcttcaggcggtggcgcaccaatggcagacaataacgagggtgccgatggagtgggtaattcctcaggaaattggcattgcgattcccaatggctgggcgacagagtcatcaccaccagcacccgcacctgggccttgcccacctacaataaccacctctacaagcaaatctccagtgcttcaacgggggccagcaacgacaaccactacttcggctacagcaccccctgggggtattttgactttaaccgcttccactgccacttctcgccaagagactggcaaagactcatcaacaacaattggggattccggcccaagagactcaacttcaaactcttcaacatccaagtcaaggaggtcacgacgaatgatggcgtcacgaccatcgccaataacctcaccagcaccatccaggtgtttacggactcggagtaccagctgccgtacgttctcggctctgcccaccagggctgcctgcctccgttcccggcggacgtgttcatgattccccagtatggatacctcaccctgaacaacggaagtcaagcggtgggacgctcatccttttactgcctggagtacttcccttcgcagatgctaaggactggaaataacttccaattcagctataccttcgaggatgtaccttttcacagcagctacgctcacagccagagtttggatcgcttgatgaatcctcttattgatcagtatctgtactacctgaacagaacgcaaggaacaacctctggaacaaccaaccaatcacggctgctttttagccaggctgggcctcagtctatgtctttgcaggccagaaattggctacctgggccctgctaccggcaacagagactttcaaagactgctaacgacaacaacaacagtaactttccttggacagcagccagcaaatatcatctcaatggccgcgactcgctggtgaatccaggaccagctatggccagtcacaaggacgatgaagaaaaatttttccctatgcacggcaatctaatatttggcaaagaagggacaacggcaagtaacgcagaattagataatgtaatgattacggatgaagaagagattcgtaccaccaatcctgtggcaacagagcagtatggaactgtggcaaataacttgcagagctcaaatacagctcccacgactagaactgtcaatgatcagggggccttacctggcatggtgtggcaagatcgtgacgtgtaccttcaggggcccatctgggcaaagattccacacacggacggacattttcacccctctcccctcatgggtggattcggacttaaacaccctcctccgcagattctcatcaagaacaccccggtacctgcgaatccttcgaccaccttcagtgcggcaaagtttgcttccttcatcacacagtactccacgggacaggtcagcgtggagatcgagtgggagctgcagaaggaaaacagcaagcgctggaacccggagatccagtacacttccaactattacaagtctaataatgttgaatttgctgttaatactgaaggtgtatatagtgaaccccgccccattggcaccagatacctgactcgtaatctgtaa

SEQ ID NO: 5234 - protein, 738 aa, synthetic construct
MAADGYLPDWLEDTLSEGIRQWWALKPGAPKPKANQQKQDDGRGLVLPGYKYLGPFNGLDKGEPVNAADAAALEHDKAYDQQLKAGDNPYLRYNHADAEFQERLQEDTSFGGNLGRAVFQAKKRVLEPLGLVEEGAKTAPGKKRPVEPSPQRSPDSSTGIGKKGQQPARKRLNFGQTGDSESVPDPQPLGEPPAAPTSLGSNTMASGGGAPMADNNEGADGVGNSSGNWHCDSQWLGDRVITTSTRTWALPTYNNHLYKQISSASTGASNDNHYFGYSTPWGYFDFNRFHCHFSPRDWQRLINNNWGFRPKRLNFKLFNIQVKEVTTNDGVTTIANNLTSTIQVFTDSEYQLPYVLGSAHQGCLPPFPADVFMIPQYGYLTLNNGSQAVGRSSFYCLEYFPSQMLRTGNNFQFSYTFEDVPFHSSYAHSQSLDRLMNPLIDQYLYYLNRTQGTTSGTTNQSRLLFSQAGPQSMSLQARNWLPGPCYRQQRLSKTANDNNNSNFPWTAASKYHLNGRDSLVNPGPAMASHKDDEEKFFPMHGNLIFGKEGTTASNAELDNVMITDEEEIRTTNPVATEQYGTVANNLQSSNTAPTTRTVNDQGALPGMVWQDRDVYLQGPIWAKIPHTDGHFHPSPLMGGFGLKHPPPQILIKNTPVPANPSTTFSAAKFASFITQYSTGQVSVEIEWELQKENSKRWNPEIQYTSNYYKSNNVEFAVNTEGVYSEPRPIGTRYLTRNL

SEQ ID NO: 5235 - DNA, 2208 bp, synthetic construct; identical to SEQ ID NO: 5065
  source 1..2208: mol_type = other DNA

SEQ ID NO: 5236 - protein, 735 aa, synthetic construct [sequence omitted]

SEQ ID NO: 5237 - DNA, 2208 bp, synthetic construct
  source 1..2208: mol_type = other DNA
atggctgccgatggttatcttccagattggctcgaggacaacctctctgagggcattcgcgagtggtgggcgctgaaacctggagccccgaagcccaaagccaaccagcaaaagcaggacgacggccggggtctggtgcttcctggctacaagtacctcggacccttcaacggactcgacaagggggagcccgtcaacgcggcggacgccgcggccctcgagcacgacaaggcctacgaccagcagctgcaggcgggtgacaatccgtacctgcggtataaccacgccgacgccgagtttcaggagcgtctgcaagaagatacgtcttttgggggcaacctcgggcgagcagtcttccaggccaaaaagaggcttcttgaacctcttggtctggttgaggaagcagctaaaacggctcctggaaagaagaggcctgtagagcagtctcctcaggaaccggactcctccgcgggtattggcaaatcgggtgcacagcccgccaaaaagagactcaatttcggtcagactggcgactcagagtcagtcccagaccctcaacctctcggagaaccaccagcagcccccacaagtttgggatctaatacaatggcttcaggcggtggcgcaccaatggcagacaataacgaaggcgccgacggagtgggtaatgcctcaggaaattggcattgcgattccacatggctgggcgacagagtcatcaccaccagcacccgcacctgggccttgcccacctacagcaaccatctctacaagcaaatctccagccaatcaggagcttcaaacgacaacgactactttggctacagcaccccttgggggtattttgatttcaacagattccactgccacttttcaccacgtgactggcaaagactcatcaacaacaactggggattccgacccaagagactcaacttcaagctctttaacattcaagtcaaagaggtcacgcagaatgacggtacgacgacgattgccaataaccttaccagcacggttcaggtgtttactgactcggagtaccagctcccgtacgtcctcggctcggcgcatcaaggatgcctcccgccgttcccagcagacgtcttcatggtgccacagtatggatacctcaccctgaacaacgggagtcaggcagtaggacgctcttcattttactgcctggagtactttccttctcagatgctgcgtaccggaaacaactttaccttcagctacacttttgaggacgttcctttccacagcagctacgctcacagccagagtctggaccgtctcatgaatcctctcatcgaccagtacctgtattacttgagcagaacaaacactccaagtggaaccaccacgcagtcaaggcttcagttttctcaggccggagcgagtgacattcgggaccagtctaggaactggcttcctggaccctgttaccgccagcagcgagtatcaaagacatctgaggataacaacaacagtgaatactcgtggactggagctaccaagtaccacctcaatggcagagactctctggtgaatccgggcccggccatggcaagccacaaggacgatgaagaaaagttttttcctcagagcggggttctcatctttgggaagcaaggctcagagaaaacaaatgtggacattgaaaaggtcatgattacagacgaagaggaaatcaggacaaccaatcccgtggctacggagcagtatggttctgtatctaccaacctccagagaggcaacagacaagcagctaccgcagatgtcaacacacaaggcgttcttccaggcatggtctggcaggacagagatgtgtaccttcaggggcccatctgggcaaagattccacacacggacggacattttcacccctctcccctcatgggtggattcggacttaaacaccctcctccacagattctcatcaagaacaccccggtacctgcgaatccttcgaccaccttcagtgcggcaaagtttgcttccttcatcacacagtactccacgggacaggtcagcgtggagatcgagtgggagctgcagaaggaaaacagcaaacgctggaatcccgaaattcagtacacttccaactacaacaagtctgttaatgtggactttactgtggacactaatggcgtgtattcagagcctcgccccattggcaccagatacctgactcgtaatctgtaa

SEQ ID NO: 5238 - protein, 735 aa, synthetic construct
MAADGYLPDWLEDNLSEGIREWWALKPGAPKPKANQQKQDDGRGLVLPGYKYLGPFNGLDKGEPVNAADAAALEHDKAYDQQLQAGDNPYLRYNHADAEFQERLQEDTSFGGNLGRAVFQAKKRLLEPLGLVEEAAKTAPGKKRPVEQSPQEPDSSAGIGKSGAQPAKKRLNFGQTGDSESVPDPQPLGEPPAAPTSLGSNTMASGGGAPMADNNEGADGVGNASGNWHCDSTWLGDRVITTSTRTWALPTYSNHLYKQISSQSGASNDNDYFGYSTPWGYFDFNRFHCHFSPRDWQRLINNNWGFRPKRLNFKLFNIQVKEVTQNDGTTTIANNLTSTVQVFTDSEYQLPYVLGSAHQGCLPPFPADVFMVPQYGYLTLNNGSQAVGRSSFYCLEYFPSQMLRTGNNFTFSYTFEDVPFHSSYAHSQSLDRLMNPLIDQYLYYLSRTNTPSGTTTQSRLQFSQAGASDIRDQSRNWLPGPCYRQQRVSKTSEDNNNSEYSWTGATKYHLNGRDSLVNPGPAMASHKDDEEKFFPQSGVLIFGKQGSEKTNVDIEKVMITDEEEIRTTNPVATEQYGSVSTNLQRGNRQAATADVNTQGVLPGMVWQDRDVYLQGPIWAKIPHTDGHFHPSPLMGGFGLKHPPPQILIKNTPVPANPSTTFSAAKFASFITQYSTGQVSVEIEWELQKENSKRWNPEIQYTSNYNKSVNVDFTVDTNGVYSEPRPIGTRYLTRNL

SEQ ID NO: 5239 - DNA, 2208 bp, synthetic construct
  source 1..2208: mol_type = other DNA
atggctgccgatggttatcttccagattggctcgaggacaacctctctgagggcattcgcgagtggtgggcgctgaaacctggagccccgaagcccaaagccaaccagcaaaagcaggacgacggccggggtctggtgcttcctggctacaagtacctcggacccttcaacggactcgacaagggggagcccgtcaacgcggcggacgcagcggccctcgagcacgacaaggcctacgaccagcagctgcaggcgggtgacaatccgtacctgcggtataaccacgccgacgccgagttccaggagcgtctgcaagaagatacgtcttttgggggcaacctcgggcgagcagtcttccaggccaagaagagggttctcgaaccttttggtctggttgaggaaggtgctaagacggctcctggaaagaaacgtccggtagagcagtcgccacaagagccagactcctcctcgggcattggcaagacaggccagcagcccgctaaaaagagactcaattttggtcagactggcgactcagagtcagtcccagaccctcaacctctcggagaaccaccagcagcccccacaagtttgggatctaatacaatggcttcaggcggtggcgcaccaatggcagacaataacgagggcgccgacggagtgggtaattcctcgggaaattggcattgcgattccacatggatgggcgacagagtcatcaccaccagcacccgaacctgggccctgcccacctacaacaaccacctctacaaacaaatttccagccaatcaggagcttcaaacgacaaccactactttggctacagcaccccttgggggtattttgactttaacagattccactgccacttttcaccacgtgactggcagcgactcattaacaacaactggggattccggcccaagaaactcaacttcaagctctttaacatccaggtcaaggaggtcacgcagaatgaaggcaccaagaccatcgccaataacctcaccagcaccatccaggtgtttacggactcggagtaccagctgccgtacgttctcggctctgcccaccagggctgcctgcctccgttcccggcggacgtgttcatgattccccagtacggctacctaacactcaacaacggtagtcaggccgtgggacgctcctccttctactgcctggaatactttccttcgcagatgctgagaaccggcaacaacttccagtttacttacaccttcgaggacgtgcctttccacagcagctacgcccacagccagagcttggaccggctgatgaatcctctgattgaccagtacctgtattacttgtctcggactcaaacaacaggaggcacgacaaatacgcagactctgggcttcagccaaggtgggcctaatacaatggccaatcaggcaaagaactggctgcctggaccctgttaccgccagcagcgagtatcaaagacatctgcggataacaacaacagtgaatactcgtggactggagctaccaagtaccacctcaatggcagagactctctggtgaatccgggcccggccatggcaagccacaaggacgatgaagaaaagttttttcctcagagcggggttctcatctttgggaagcaaggctcagagaaaacaaatgtggacattgaaaaggttatgattacagacgaagaggaaatcaggacaaccaatcccgtggctacggagcagtatggttctgtatctaccaacctccagagaggcaacagacaagcagctaccgcagatgtcaacacacagggcgttcttccaggcatggtctggcaggacagagatgtgtaccttcagggtcccatttgggccaaaattcctcacacagatggacactttcacccgtcccctcttatgggcggctttggactcaagaacccgcctcctcagatcctcatcaaaaacacgcctgttcctgcgaatcctccggcagagttttcagctacaaagtttgcttcattcatcacccaatactccacaggacaagtgagtgtggaaattgaatgggagctgcagaaagaaaacagcaagcgctggaatcccgaagtgcagtacacatccaattatgcaaaatctgccaacgttgattttactgtggacactaatggcgtgtattcagagcctcgccccattggcaccagatacctcacccgtaatctgtaa

SEQ ID NO: 5240 - protein, 735 aa, synthetic construct
MAADGYLPDWLEDNLSEGIREWWALKPGAPKPKANQQKQDDGRGLVLPGYKYLGPFNGLDKGEPVNAADAAALEHDKAYDQQLQAGDNPYLRYNHADAEFQERLQEDTSFGGNLGRAVFQAKKRVLEPFGLVEEGAKTAPGKKRPVEQSPQEPDSSSGIGKTGQQPAKKRLNFGQTGDSESVPDPQPLGEPPAAPTSLGSNTMASGGGAPMADNNEGADGVGNSSGNWHCDSTWMGDRVITTSTRTWALPTYNNHLYKQISSQSGASNDNHYFGYSTPWGYFDFNRFHCHFSPRDWQRLINNNWGFRPKKLNFKLFNIQVKEVTQNEGTKTIANNLTSTIQVFTDSEYQLPYVLGSAHQGCLPPFPADVFMIPQYGYLTLNNGSQAVGRSSFYCLEYFPSQMLRTGNNFQFTYTFEDVPFHSSYAHSQSLDRLMNPLIDQYLYYLSRTQTTGGTTNTQTLGFSQGGPNTMANQAKNWLPGPCYRQQRVSKTSADNNNSEYSWTGATKYHLNGRDSLVNPGPAMASHKDDEEKFFPQSGVLIFGKQGSEKTNVDIEKVMITDEEEIRTTNPVATEQYGSVSTNLQRGNRQAATADVNTQGVLPGMVWQDRDVYLQGPIWAKIPHTDGHFHPSPLMGGFGLKNPPPQILIKNTPVPANPPAEFSATKFASFITQYSTGQVSVEIEWELQKENSKRWNPEVQYTSNYAKSANVDFTVDTNGVYSEPRPIGTRYLTRNL

SEQ ID NO: 5241 - DNA, 2214 bp, synthetic construct; identical to SEQ ID NO: 5231
  source 1..2214: mol_type = other DNA

SEQ ID NO: 5242 - protein, 737 aa, synthetic construct; identical to SEQ ID NO: 5232

SEQ ID NO: 5243 - protein, 736 aa, synthetic construct; identical to SEQ ID NO: 5056

SEQ ID NO: 5244 - protein, 736 aa, synthetic construct
MAADGYLPDWLEDNLSEGIREWWDLKPGAPKPKANQQKQDDGRGLVLPGYKYLGPFNGLDKGEPVNAADAAALEHDKAYDQQLKAGDNPYLRYNHADAEFQERLQEDTSFGGNLGRAVFQAKKRVLEPLGLVEEGAKTAPGKKRPVEQSPQEPDSSSGIGKTGQQPAKKRLNFGQTGDSESVPDPQPLGEPPAAPSGLGPNTMASGGGAPMADNNEGADGVGNSSGNWHCDSTWLGDRVITTSTRTWALPTYNNHLYKQISNGTSGGSTNDNTYFGYSTPWGYFDFNRFHCHFSPRDWQRLINNNWGFRPKRLNFKLFNIQVKEVTTNEGTKTIANNLTSTVQVFTDSEYQLPYVLGSAHQGCLPPFPADVFMVPQYGYLTLNNGSQALGRSSFYCLEYFPSQMLRTGNNFQFSYTFEDVPFHSSYAHSQSLDRLMNPLIDQYLYYLVRTQTTGTGGTQTLAFSQAGPSSMANQARNWVPGPCYRQQRVSTTTNQNNNSNFAWTGAAKFKLNGRDSLMNPGVAMASHKDDEDRFFPSSGVLIFGKQGAGNDGVDYSQVLITDEEEIKATNPVATEEYGAVAINNQRANTQAQTGLVHNQGVIPGMVWQNRDVYLQGPIWAKIPHTDGNFHPSPLMGGFGLKHPPPQILIKNTPVPADPPLTFNQAKLNSFITQYSTGQVSVEIEWELQKENSKRWNPEIQYTSNYYKSTNVDFAVNTEGVYSEPRPIGTRYLTRNL

SEQ ID NO: 5245 - protein, 736 aa, synthetic construct
MAADGYLPDWLEDNLSEGIREWWDLKPGAPKPKANQQKQDDGRGLVLPGYKYLGPFNGLDKGEPVNAADAAALEHDKAYDQQLKAGDNPYLRYNHADAEFQERLQEDTSFGGNLGRAVFQAKKRVLEPLGLVEEGAKTAPGKKRPVEQSPQEPDSSSGIGKTGQQPAKKRLNFGQTGDSESVPDPQPLGEPPAAPSGLGPNTMASGGGAPMADNNEGADGVGNSSGNWHCDSTWLGDRVITTSTRTWALPTYNNHLYKQISNGTSGGSTNDNTYFGYSTPWGYFDFNRFHCHFSPRDWQRLINNNWGFRPKRLNFKLFNIQVKEVTTNEGTKTIANNLTSTVQVFTDSEYQLPYVLGSAHQGCLPPFPADVFMVPQYGYLTLNNGSQALGRSSFYCLEYFPSQMLRTGNNFQFSYTFEDVPFHSSYAHSQSLDRLMNPLIDQYLYYLVRTQTTGTGGTQTLAFSQAGPSSMANQARNWVPGPCYRQQRVSTTTNQNNNSNFAWTGAAKFKLNGRDSLMNPGVAMASHKDDEDAFFPSSGVLIFGKQGAGNDGVDYSQVLITDEEEIKATNPVATEEYGAVAINNQAANTQAQTGLVHNQGVIPGMVWQNRDVYLQGPIWAKIPHTDGNFHPSPLMGGFGLKHPPPQILIKNTPVPADPPLTFNQAKLNSFITQYSTGQVSVEIEWELQKENSKRWNPEIQYTSNYYKSTNVDFAVNTEGVYSEPRPIGTRYLTRNL

SEQ ID NO: 5246 - protein, 538 aa, synthetic construct
MRAAAGGNGGDAGQGAEGVGNASGDWHCDSTWSESHVTTTSTRTWVLPTYNNHLYLRLGSSNASDTFNGFSTPWGYFDFNRFHCHFSPRDWQRLINNHWGLRPKSMQVRIFNIQVKEVTTSNGETTVSNNLTSTVQIFADSTYELPYVMDAGQEGSLPPFPNDVFMVPQYGYCGLVTGGSSQNQTDRNAFYCLEYFPSQMLRTGNNFEMVYKFENVPFHSMYAHSQSLDRLMNPLLDQYLWELQSTTSGGTLNQGNSATNFAKLTKTNFSGYRKNWLPGPMMKQQRFSKTASQNYKIPQGRNNSLLHYETRTTLDGRWSNFAPGTAMATAANDATDFSQAQLIFAGPNITGNTTTDANNLMFTSEDELRATNPRDTDLFGHLATNQQNATTVPTVDDVDGVGVYPGMVWQDRDIYYQGPIWAKIPHTDGHFHPSPLIGGFGLKSPPPQIFIKNTPVPANPATTFSPARINSFITQYSTGQVAVKIEWEIQKERSKRWNPEVQFTSNYGAQDSLLWAPDNAGAYKEPRAIGSRYLTNHL

SEQ ID NO: 5247 - protein, 736 aa, synthetic construct
MSFVDHPPDWLESIGDGFREFLGLEAGPPKPKANQQKQDNARGLVLPGYKYLGPGNGLDKGDPVNFADEVAREHDLSYQKQLEAGDNPYLKYNHADAEFQEKLASDTSFGGNLGKAVFQAKKRILEPLGLVETPDKTAPAAKKRPLEQSPQEPDSSSGVGKKGKQPARKRLNFDDEPGAGDGPPPEGPSSGAMSTETEMRAAAGGNGGDAGQGAEGVGNASGDWHCDSTWSESHVTTTSTRTWVLPTYNNHLYLRLGSSNASDTFNGFSTPWGYFDFNRFHCHFSPRDWQRLINNHWGLRPKSMQVRIFNIQVKEVTTSNGETTVSNNLTSTVHIFADSTYELPYVMDAGQEGSLPPFPNDVFMVPQYGYCGLVTGGSSQNQTDRNAFYCLEYFPSQMLRTGNNFEMVYKFENVPFHSMYAHSQSLDRLMNPLLDQYLWELQSTTSGGTLNQGNSATNFAKLTNKNFSGYRKNWLPGPMMKQQRFSKTASQNYKIPQGGNNSLLHYETRTTLDRRWSNFAPGTAMATAANDATDFSQAQLIFAGPNITGNTTTDANNLMFTSEDELRATNPRDTDLFGHLATNQQNATTVPTVDDVDGVGVYPGMVWQDRDIYYQGPIWAKIPHTDGHFHPSPLIGGFGLKSPPPQIFIKNTPVPANPATTFSPARINSFITQYSTGQVAVKIEWEIQKERSKRWNPEVQFTSNYGAQDSLLWAPDNAGAYKEPRAIGSRYLTNHL

SEQ ID NO: 5248 - protein, 736 aa, synthetic construct
MSFVDHPPDWLESIGDGFREFLGLEAGPPKPKANQQKQDNARGLVLPGYKYLGPGNGLDKGDPVNFADEVAREHDLSYQKQLEAGDNPYLKYNHADAEFQEKLASDTSFGGNLGKAVFQAKKRILEPLGLVETPDKTAPAAKKRPLEQSPQEPDSSSGVGKKGKQPARKRLNFDDEPGAGDGPPPEGPSSGAMSTETEMRAAAGGNGGDAGQGAEGVGNASGDWHCDSTWSESHVTTTSTRTWVLPTYNNHLYLRLGSSNASDTFNGFSTPWGYFDFNRFHCHFSPRDWQRLINNHWGLRPKSMQVRIFNIQVKEVTTSNGETTVSNNLTSTVQIFADSTYELPYVMDAGQEGSLPPFPNDVFMVPQYGYCGLVTGGSSQNQTDRNAFYCLEYFPSQMLRTGNNFEMVYKFENVPFHSMYAHSQSLDRLMNPLLDQYLWELQSTTSGGTLNQGNSATNFAKLTKTNFSGYRKNWLPGPMMKQQRFSKTASQNYKIPQGRNNSLLHYETRTTLDGRWSNFAPGTAMATAANDATDFSQAQLIFAGPNITGNTTTDANNLMFTSEDELRATNPRDTDLFGHLATNQQNATTVPTVDDVDGVGVYPGMVWQDRDIYYQGPIWAKIPHTDGHFHPSPLIGGFGLKSPPPQIFIKNTPVPANPATTFSPARINSFITQYSTGQVAVKIEWEIQKERSKRWNPEVQFTSNYGAQDSLLWAPDNAGAYKEPRAIGSRYLTNHL

SEQ ID NO: 5249 - DNA, 2214 bp, synthetic construct
  source 1..2214: mol_type = other DNA
atggctgccgatggttatcttccagattggctcgaggacactctctctgaaggaataagacagtggtggaagctcaaacctggcccaccaccaccaaagcccgcagagcggcataaggacgacagcaggggtcttgtgcttcctgggtacaagtacctcggacccttcaacggactcgacaagggagagccggtcaacgaggcagacgccgcggccctcgagcacgacaaagcctacgaccggcagctcgacagcggagacaacccgtacctcaagtacaaccacgccgacgcggagtttcaggagcgccttaaagaagatacgtcttttgggggcaacctcgggcgagcagtcttccaggccaaaaagaggcttcttgaacctcttggtctggttgaggaagcggctaagacggctcctggaaagaagaggcctgtagagcagtctcctcaggaaccggactcctcctcgggcatcggcaagacaggccagcagcccgctaaaaagagactcaatttcggtcagactggcgacacagagtcagtcccagaccctcaaccaatcggagaacctcccgcagccccctcaggtgtgggatctcttacaatggcttcaggtggtggcgcaccagtggcagacaataacgaaggtgccgatggagtgggtagttcctcgggaaattggcattgcgattcccaatggctgggggacagagtcatcaccaccagcacccgaacctgggccctgcccacctacaacaatcacctctacaagcaaatctccaacgggacatcgggaggagccaccaacgacaacacctacttcggctacagcaccccctgggggtattttgactttaacagattccactgccacttttcaccacgtgactggcagcgactcatcaacaacaactggggattccggcccaagagactcagcttcaagctcttcaacatccaggtcaaggaggtcacgcagaatgaaggcaccaagaccatcgccaataaccttaccagcacggtccaggtcttcacggactcggagtaccagctgccgtacgttctcggctctgcccaccagggctgcctgcctccgttcccggcggacgtgttcatgattccccagtacggctacctaacactcaacaacggtagtcaggccgtgggacgctcctccttctactgcctggaatactttccttcgcagatgctgagaaccggcaacaacttccagtttacttacaccttcgaggacgtgcctttccacagcagctacgcccacagccagagcttggaccggctgatgaatcctctgattgaccagtacctgtactacttgtctcggactcaaacaacaggaggcacggcaaatacgcagactctgggcttcagccaaggtgggcctaatacaatggccaatcaggcaaagaactggctgccaggaccctgttaccgccaacaacgcgtctcaacgacaaccgggcaaaacaacaatagcaactttgcctggactgctgggaccaaataccatctgaatggaagaaattcattggctaatcctggcatcgctatggcaacacacaaagacgacaaggagcgtttttttcccagtaacgggatcctgatttttggcaaacaaaatgctgccagagacaatgcggattacagcgatgtcatgctcaccagcgaggaagaaatcaaaaccactaaccctgtggctacagaggaatacggtatcgtggcagataacttgcagcagcaaaacacggctcctcaaattggaactgtcaacagccagggggccttacccggtatggtttggcagaaccgggacgtgtacctgcagggtcccatctgggccaagattcctcacacggacggcaacttccacccgtctccgctgatgggcggctttggcctgaaacatcctccgcctcagatcctgatcaagaacacgcctgtacctgcggatcctccgaccaccttcaaccagtcaaagctgaactctttcatcacgcaatacagcaccggacaggtcagcgtggaaattgaatgggagctgcagaaggaaaacagcaagcgctggaaccccgagatccagtacacctccaactactacaaatctacaagtgtggactttgctgttaatacagaaggcgtgtactctgaaccccaccccattggcacccgttacctcacccgtcccctgtaa

SEQ ID NO: 5250 - protein, 737 aa, synthetic construct
MAADGYLPDWLEDTLSEGIRQWWKLKPGPPPPKPAERHKDDSRGLVLPGYKYLGPFNGLDKGEPVNEADAAALEHDKAYDRQLDSGDNPYLKYNHADAEFQERLKEDTSFGGNLGRAVFQAKKRLLEPLGLVEEAAKTAPGKKRPVEQSPQEPDSSSGIGKTGQQPAKKRLNFGQTGDTESVPDPQPIGEPPAAPSGVGSLTMASGGGAPVADNNEGADGVGSSSGNWHCDSQWLGDRVITTSTRTWALPTYNNHLYKQISNGTSGGATNDNTYFGYSTPWGYFDFNRFHCHFSPRDWQRLINNNWGFRPKRLSFKLFNIQVKEVTQNEGTKTIANNLTSTVQVFTDSEYQLPYVLGSAHQGCLPPFPADVFMIPQYGYLTLNNGSQAVGRSSFYCLEYFPSQMLRTGNNFQFTYTFEDVPFHSSYAHSQSLDRLMNPLIDQYLYYLSRTQTTGGTANTQTLGFSQGGPNTMANQAKNWLPGPCYRQQRVSTTTGQNNNSNFAWTAGTKYHLNGRNSLANPGIAMATHKDDKERFFPSNGILIFGKQNAARDNADYSDVMLTSEEEIKTTNPVATEEYGIVADNLQQQNTAPQIGTVNSQGALPGMVWQNRDVYLQGPIWAKIPHTDGNFHPSPLMGGFGLKHPPPQILIKNTPVPADPPTTFNQSKLNSFITQYSTGQVSVEIEWELQKENSKRWNPEIQYTSNYYKSTSVDFAVNTEGVYSEPHPIGTRYLTRPL

SEQ ID NO: 5251 - protein, 736 aa, synthetic construct
MAADGYLPDWLEDNLSEGIREWWDLKPGAPKPKANQQKQDDGRGLVLPGYKYLGPFNGLDKGEPVNAADAAALEHDKAYDQQLKAGDNPYLRYNHADAEFQERLQEDTSFGGNLGRAVFQAKKRVLEPLGLVEEGAKTAPGKKRPVEQSPQEPDSSSGIGKTGQQPAKKRLNFGQTGDTESVPDPQPIGEPPAAPSGVGSLTMASGGGAPVADNNEGADGVGSSSGNWHCDSQWLGDRVITTSTRTWALPTYNNHLYKQISSASTGASNDNHYFGYSTPWGYFDFNRFHCHFSPRDWQRLINNNWGFRPKRLNFKLFNIQVKEVTDNNGVKTIANNLTSTVQVFTDSDYQLPYVLGSAHQGCLPPFPADVFMIPQYGYLTLNNGSQAVGRSSFYCLEYFPSQMLRTGNNFQFTYTFEDVPFHSSYAHSQSLDRLMNPLIDQYLYYLSRTQTTGGTANTQTLGFSQGGPNTMANQAKNWLPGPCYRQQRVSTTTGQNNNSNFAWTAGTKYHLNGRNSLANPGIAMATHKDDKERFFPSNGILIFGKQNAARDNADYSDVMLTSEEEIKTTNPVATEEYGIVADNLQQQNTAPQIGTVNSQGALPGMVWQNRDVYLQGPIWAKIPHTDGNFHPSPLMGGFGLKHPPPQILIKNTPVPADPPTTFNQSKLNSFITQYSTGQVSVEIEWELQKENSKRWNPEIQYTSNYYKSTSVDFAVNTEGVYSEPHPIGTRYLTRPL

SEQ ID NO: 5252 - protein, 736 aa, synthetic construct
MAADGYLPDWLEDTLSEGIRQWWKLKPGPPPPKPAERHKDDSRGLVLPGYKYLGPFNGLDKGEPVNEADAAALEHDKAYDRQLDSGDNPYLKYNHADAEFQERLQGDTSFGGNLGRAVFQAKKRVLEPLGLVEEGAKTAPGKKRPVEQSPQEPDSSSGIGETGQQPAKKRLNFGQTGDSESVPDPQPLGEPPATPAAVGPTTMASGGGAPMADNNEGADGVGSSSGNWHCDSQWLGDRVITTSTRTWALPTYNNHLYKQISSASTGASNDNHYFGYSTPWGYFDFNRFHCHFSPRDWQRLINNNWGFRPKRLSFKLFNIQVKEVTDNNGVKTIANNLTSTVQVFTDSEYQLPYVLGSAHQGCLPPFPADVFMIPQYGYLTLNNGSQAVGRSSFYCLEYFPSQMLRTGNNFTFSYTFEDVPFHSSYAHSQSLDRLMNPLIDQYLYYLSRTQTTGGTANTQTLGFSQGGPNTMANQAKNWLPGPCYRQQRVSTTTGQNNNSNFAWTAGTKYHLNGRNSLANPGIAMATHKDDKERFFPSNGILIFGKQNAARDNADYSDVMLTSEEEIKTTNPVATEEYGIVADNLQQQNTAPQIGTVNSQGALPGMVWQNRDVYLQGPIWAKIPHTDGNFHPSPLMGGFGLKHPPPQILIKNTPVPADPPTTFNQSKLNSFITQYSTGQVSVEIEWELQKENSKRWNPEIQYTSNYYKSTSVDFAVNTEGVYSEPHPIGTRYLTRPL

SEQ ID NO: 5253 - DNA, 2181 bp, synthetic construct
  source 1..2181: mol_type = other DNA
atgtcttttgttgatcaccctccagattggttggaagaagttggtgaaggtcttcgcgagtttttgggccttgaagcgggcccaccgaaaccaaaacccaatcagcagcatcaagatcaagcccgtggtcttgtgctgcctggttataactatctcggacccggaaacggtctcgatcgaggagagcctgtcaacagggcagacgaggtcgcgcgagagcacgacatctcgtacaacgagcagcttgaggcgggagacaacccctacctcaagtacaaccacgcggacgccgagtttcaggagaagctcgccgacgacacatccttcgggggaaacctcggaaaggcagtctttcaggccaagaaaagggttctcgaaccttttggcctggttgaagagggtgctaagacggcccctaccggaaagcggatagacgaccactttccaaaaagaaagaaggctcggaccgaagaggactccaagccttccacctcgtcagacgccgaagctggacccagcggatcccagcagctgcaaatcccagcacaaccagcctcaagtttgggagctgatacaatgtctgcgggaggtggcggcccattgggcgacaataaccaaggtgccgatggagtgggcaatgcctcgggagattggcattgcgattccacgtggatgggggacagagtcgtcaccaagtccacccgcacctgggtgctgcccagctacaacaaccaccagtaccgagagatcaaaagcggctccgtcgacggaagcaacgccaacgcctactttggatacagcaccccctgggggtactttgactttaaccgcttccacagccactggagcccccgagactggcaaagactcatcaacaactattggggcttcagaccccggtctctcagagtcaaaatcttcaacatccaagtcaaagaggtcacggtgcaggactccaccaccaccatcgccaacaacctcacctccaccgtccaagtgtttacggacgacgactaccaactcccgtacgtcgtcggcaacgggaccgagggatgcctgccggccttccccccgcaggtctttacgctgccgcagtacggctacgcgacgctgaaccgagacaacggagacaacccgacagagcggagcagcttcttttgcctagagtactttcccagcaagatgctgaggacgggcaacaactttgagtttacctacagctttgaagaggtgcccttccactgcagcttcgccccgagccagaacctctttaagctggccaacccgctggtggaccagtacctgtaccgcttcgtgagcacctcggccacgggcgccatccagttccaaaagaacctggcgggcagatacgccaacacctacaaaaactggttcccggggcccatgggccgaacccagggctggaacacgagctctggggtcagcagcaccaacagagtcagcgtcaacaacttttccgtctcaaaccggatgaacctggagggggccagctaccaagtgaacccccagcccaacgggatgacaaacacgctccaaggcagcaaccgctacgcgctggaaaacaccatgatcttcaacgctcaaaacgccacgccgggaactacctcggtgtacccagaggacaatctactgctgaccagcgagagcgagactcagcccgtcaaccgggtggcttacaacacgggcggtcagatggccaccaacgcccagaacgccaccacggctcccacggtcgggacctacaacctccaggaagtgcttcctggcagcgtatggatggagagggacgtgtacctccaaggacccatctgggccaagatcccagagacgggggcgcactttcacccctctccggccatgggcggattcggactcaaacacccgccgcccatgatgctcatcaaaaacacgccggtgcccggcaacatcaccagcttctcggacgtgcccgtcagcagcttcatcacccagtacagcaccgggcaggtcaccgtggagatggaatgggagctcaaaaaggaaaactccaagaggtggaacccagagatccagtacaccaacaactacaacgacccccagtttgtggactttgctccagacggctccggcgaatacagaaccaccagagccatcggaacccgatacctcacccgacccctt

SEQ ID NO: 5254 - protein, 726 aa, synthetic construct
MSFVDHPPDWLEEVGEGLREFLGLEAGPPKPKPNQQHQDQARGLVLPGYNYLGPGNGLDRGEPVNRADEVAREHDISYNEQLEAGDNPYLKYNHADAEFQEKLADDTSFGGNLGKAVFQAKKRVLEPFGLVEEGAKTAPTGKRIDDHFPKRKKARTEEDSKPSTSSDAEAGPSGSQQLQIPAQPASSLGADTMSAGGGGPLGDNNQGADGVGNASGDWHCDSTWMGDRVVTKSTRTWVLPSYNNHQYREIKSGSVDGSNANAYFGYSTPWGYFDFNRFHSHWSPRDWQRLINNYWGFRPRSLRVKIFNIQVKEVTVQDSTTTIANNLTSTVQVFTDDDYQLPYVVGNGTEGCLPAFPPQVFTLPQYGYATLNRDNGDNPTERSSFFCLEYFPSKMLRTGNNFEFTYSFEEVPFHCSFAPSQNLFKLANPLVDQYLYRFVSTSATGAIQFQKNLAGRYANTYKNWFPGPMGRTQGWNTSSGSSTNRVSVNNFSVSNRMNLEGASYQVNPQPNGMTNTLQGSNRYALENTMIFNAQNATPGTTSVYPEDNLLLTSESETQPVNRVAYNTGGQMATNAQNATTAPTVGTYNLQEVLPGSVWMERDVYLQGPIWAKIPETGAHFHPSPAMGGFGLKHPPPMMLIKNTPVPGNITSFSDVPVSSFITQYSTGQVTVEMEWELKKENSKRWNPEIQYTNNYNDPQFVDFAPDGSGEYRTTRAIGTRYLTRPL

SEQ ID NO: 5255 - protein, 735 aa, synthetic construct
MAADGYLPDWLEDTLSEGIRQWWKLKPGPPPPKPAERHKDDSRGLVLPGYKYLGPFNGLDKGEPVNEADAAALEHDKAYDRQLDSGDNPYLKYNHADAEFQERLKEDTSFGGNLGRAVFQAKKRILEPLGLVEEPVKTAPGKKRPVEHSPAEPDSSSGTGKSGQQPARKRLNFGQTGDADSVPDPQPLGQPPAAPSGLGTNTMASGSGAPMADNNEGADGVGNSSGNWHCDSTWMGDRVITTSTRTWALPTYNNHLYKQISSQSGASNDNHYFGYSTPWGYFDFNRFHCHFSPRDWQRLINNNWGFRPKRLSFKLFNIQVKEVTQNDGTTTIANNLTSTVQVFTDSEYQLPYVLGSAHQGCLPPFPADVFMVPQYGYLTLNNGSQAVGRSSFYCLEYFPSQMLRTGNNFTFSYTFEDVPFHSSYAHSQSLDRLMNPLIDQYLYYLSRTNTPSGTTTMSRLQFSQAGASDIRDQSRNWLPGPCYRQQRVSKTAADNNNSDYSWTGATKYHLNGRDSLVNPGPAMASHKDDEEKYFPQSGVLIFGKQDSGKTNVDIEKVMITDEEEIRTTNPVATEQYGSVSTNLQSGNTQAATSDVNTQGVLPGMVWQDRDVYLQGPIWAKIPHTDGHFHPSPLMGGFGLKHPPPQILIKNTPVPANPSTTFSAAKFASFITQYSTGQVSVEIEWELQKENSKRWNPEIQYTSNYNKSVNVDFTVDTNGVYSEPRPIGTRYLTRNL

SEQ ID NO: 5256 - DNA, 1803 bp, Bovine adeno-associated virus
  source 1..1803: mol_type = genomic DNA
acggcgcctgcggcaaaaaagaggcctctagagcagagtcctcaagagccagactcctcgagcggagttggcaagaaaggcaaacagcctgccagaaagagactcaactttgacgacgaacctggagccggagacgggcctcccccagaaggaccatcttccggagctatgtctactgagactgaaatgcgtgcagcagctggcggaaatggtggcgatgcgggacaaggtgccgagggagtgggtaatgcctccggtgattggcattgcgattccacttggtcagagagccacgtcaccaccacctcaacccgcacctgggtcctgccgacctacaacaaccacctgtacctgcggctcggctcgagcaacgccagcgacaccttcaacggattctccaccccctggggatactttgactttaaccgcttccactgccacttctcgccaagagactggcaaaggctcatcaacaaccactggggactgcgccccaaaagcatgcaagtccgcatcttcaacatccaagttaaggaggtcacgacgtctaacggggagacgaccgtatccaacaacctcaccagcacggtccagatctttgcggacagcacgtacgagctcccgtacgtgatggatgcaggtcaggagggcagcttgcctcctttccccaacgacgtgttcatggtgcctcagtacgggtactgcggactggtaaccggaggcagctctcaaaaccagacagacagaaatgccttctactgtctggagtactttcccagccagatgctgagaaccggaaacaactttgagatggtgtacaagtttgaaaacgtgcccttccactccatgtacgctcacagccagagcctggataggctgatgaacccgctgctggaccagtacctgtgggagctccagtctaccacctctggaggaactctcaaccagggcaattcagccaccaactttgccaagctgaccaaaacaaacttttctggctaccgcaaaaactggctcccggggcccatgatgaagcagcagagattctccaagactgccagtcaaaactacaagattccccagggaagaaacaacagtctgctccattatgagaccagaactaccctcgacggaagatggagcaattttgccccgggaacggccatggcaaccgcagccaacgacgccaccgacttctctcaggcccagctcatctttgcggggcccaacatcaccggcaacaccaccacagatgccaataacctgatgttcacttcagaagatgaacttagggccaccaacccccgggacactgacctgtttggccacctggcaaccaaccagcaaaacgccaccaccgttcctaccgtagacgacgtggacggagtcggcgtgtacccgggaatggtgtggcaggacagagacatttactaccaagggcccatttgggccaaaattccacacacggatggacactttcacccgtctcctctcattggcggatttggactgaaaagcccgcctccacaaatattcatcaaaaacactcctgtacccgccaatcccgcaacgaccttctctccggccagaatcaacagcttcatcacccagtacagcaccggacaggtggctgtcaaaatagaatgggaaatccagaaggagcggtccaagagatggaacccagaggtccagttcacgtccaactacggagcacaggactcgcttctctgggctcccgacaacgccggagcctacaaagagcccagggccattggatcccgatacctcaccaaccacctctag

SEQ ID NO: 5257 - DNA, 1617 bp, Bovine adeno-associated virus
  source 1..1617: mol_type = genomic DNA
atgcgtgcagcagctggcggaaatggtggcgatgcgggacaaggtgccgagggagtgggtaatgcctccggtgattggcattgcgattccacttggtcagagagccacgtcaccaccacctcaacccgcacctgggtcctgccgacctacaacaaccacctgtacctgcggctcggctcgagcaacgccagcgacaccttcaacggattctccaccccctggggatactttgactttaaccgcttccactgccacttctcgccaagagactggcaaaggctcatcaacaaccactggggactgcgccccaaaagcatgcaagtccgcatcttcaacatccaagttaaggaggtcacgacgtctaacggggagacgaccgtatccaacaacctcaccagcacggtccagatctttgcggacagcacgtacgagctcccgtacgtgatggatgcaggtcaggagggcagcttgcctcctttccccaacgacgtgttcatggtgcctcagtacgggtactgcggactggtaaccggaggcagctctcaaaaccagacagacagaaatgccttctactgtctggagtactttcccagccagatgctgagaaccggaaacaactttgagatggtgtacaagtttgaaaacgtgcccttccactccatgtacgctcacagccagagcctggataggctgatgaacccgctgctggaccagtacctgtgggagctccagtctaccacctctggaggaactctcaaccagggcaattcagccaccaactttgccaagctgaccaaaacaaacttttctggctaccgcaaaaactggctcccggggcccatgatgaagcagcagagattctccaagactgccagtcaaaactacaagattccccagggaagaaacaacagtctgctccattatgagaccagaactaccctcgacggaagatggagcaattttgccccgggaacggccatggcaaccgcagccaacgacgccaccgacttctctcaggcccagctcatctttgcggggcccaacatcaccggcaacaccaccacagatgccaataacctgatgttcacttcagaagatgaacttagggccaccaacccccgggacactgacctgtttggccacctggcaaccaaccagcaaaacgccaccaccgttcctaccgtagacgacgtggacggagtcggcgtgtacccgggaatggtgtggcaggacagagacatttactaccaagggcccatttgggccaaaattccacacacggatggacactttcacccgtctcctctcattggcggatttggactgaaaagcccgcctccacaaatattcatcaaaaacactcctgtacccgccaatcccgcaacgaccttctctccggccagaatcaacagcttcatcacccagtacagcaccggacaggtggctgtcaaaatagaatgggaaatccagaaggagcggtccaagagatggaacccagaggtccagttcacgtccaactacggagcacaggactcgcttctctgggctcccgacaacgccggagcctacaaagagcccagggccattggatcccgatacctcaccaaccacctctag

SEQ ID NO: 5258 - DNA, 1173 bp, Bovine adeno-associated virus
  source 1..1173: mol_type = genomic DNA
atggcgctggtaagctggctggtggaacatggcatcacttccgagaagcagtggattcaggagaatcaggagagctacctgtccttcaactccacgggaaactctcggagccagattaaagccgcgcttgacaacgcgtcaaaaattatgagtctgaccaaatctgcctcagactatctcgtgggacagactgttccagaggacatttctgaaaacagaatctggcagatttttgatctcaacggctacgacccggcatacgcgggctctgttctctacggctggtgcactcgcgcctttggaaagaggaacaccgtctggctgtatggacccgcgaccaccggaaagaccaacatcgcggaagccatctctcacaccgtgcccttttatggctgtgtgaactggactaatgagaactttccctttaatgactgtgtggaaaaaatgttgatctggtgggaggagggaaagatgaccagcaaggtggtggaacccgccaaggccatcttgggggggtctagagtacgagtggatcaaaaatgtaaatcctctgtacaagtagactctaccccggtgattatcacctccaatactaacatgtgtgtggtggtggatgggaactccacgacctttgaacaccagcagccgctggaagaccgcatgttcagatttgaactcatgcggcggctcccgccagattttggcaagattaccaagcaggaagtcaaagacttttttgcttgggcaaaggtcaaccaggtgccggtgactcacgagtttatggttcccaagaaagtggcgggaactgagagggcggagacttctagaaaacgcccactggatgacgtcaccaataccaactataaaagtccggagaagcgggcccggctctcagttgttcctgagacgcctcgcagttcagacgtgcctgtagagcccgctcctctgcgacctctcaactggtcttccaggtatgaatgcagatgtgactatcatgctaaatttgactctgtaacgggggaatgtgacgagtgtgaatatttgaatcggggcaaaaatggctgtatctttcataatgctacacattgtcaaatttgtcacgctgttcctccatgggaaaaggaaaatgtgtcagattttaatgattttgatgactgtaataaagagcagtaa

SEQ ID NO: 5259 - DNA, 1833 bp, Bovine adeno-associated virus
  source 1..1833: mol_type = genomic DNA
atggctaccttctatgaagtcattgttcgcgttccatttgatgtggaagagcacctgcctggaatttctgacaactttgtagactgggtaactggtcaaatttgggagctgcctcccgagtcagatttgaatttgactctgattgagcagcctcagctgacggtggctgacagaattcgccgcgtgttcctgtacgagtggaacaaattttccaagcaggagagcaaattctttgtgcagtttgaaaagggatctgaatattttcatctgcacacgctcgtggagacctccggcatctcttctatggtccttggccgctacgtgagtcagattcgcgcccagctggtgaaggtggtgttccagaacattgagccgcggattaacgactgggtcgccatcaccaaggtaaagaagggcggagccaataaggtggtggattctgggtatattcccgcctacctgctgccgaaggtccaaccagagcttcagtgggcgtggactaacctcgaagagtataaattggccgccctcaatctggaggagcgcaaacggctcgtcgctcagtttcagcttgagtcctcgcagcgctcgcaagaggcatcttcccagagggacgtttcggctgacccggtcatcaagagcaagacttcccagaaatacatggcgctggtaagctggctggtggaacatggcatcacttccgagaagcagtggattcaggagaatcaggagagctacctgtccttcaactccacgggaaactctcggagccagattaaagccgcgcttgacaacgcgtcaaaaattatgagtctgaccaaatctgcctcagactatctcgtgggacagactgttccagaggacatttctgaaaacagaatctggcagatttttgatctcaacggctacgacccggcatacgcgggctctgttctctacggctggtgcactcgcgcctttggaaagaggaacaccgtctggctgtatggacccgcgaccaccggaaagaccaacatcgcggaagccatctctcacaccgtgcccttttatggctgtgtgaactggactaatgagaactttccctttaatgactgtgtggaaaaaatgttgatctggtgggaggagggaaagatgaccagcaaggtggtggaacccgccaaggccatcttgggggggtctagagtacgagtggatcaaaaatgtaaatcctctgtacaagtagactctaccccggtgattatcacctccaatactaacatgtgtgtggtggtggatgggaactccacgacctttgaacaccagcagccgctggaagaccgcatgttcagatttgaactcatgcggcggctcccgccagattttggcaagattaccaagcaggaagtcaaagacttttttgcttgggcaaaggtcaaccaggtgccggtgactcacgagtttatggttcccaagaaagtggcgggaactgagagggcggagacttctagaaaacgcccactggatgacgtcaccaataccaactataaaagtccggagaagcgggcccggctctcagttgttcctgagacgcctcgcagttcagacgtgcctgtagagcccgctcctctgcgacctctcaactggtcttccaggtatgaatgcagatgtgactatcatgctaaatttgactctgtaacgggggaatgtgacgagtgtgaatatttgaatcggggcaaaaatggctgtatctttcataatgctacacattgtcaaatttgtcacgctgttcctccatgggaaaaggaaaatgtgtcagattttaatgattttgatgactgtaataaagagcagtaa

SEQ ID NO: 5260 - DNA, 2211 bp, Bovine adeno-associated virus
  source 1..2211: mol_type = genomic DNA
atgtcttttgttgaccaccctccagattggttggaatcgatcggcgacggctttcgtgaatttctcggccttgaggcgggtcccccgaaacccaaggccaatcaacagaagcaagataacgctcgaggtcttgtgcttcctgggtacaagtatcttggtcctgggaacggccttgataagggcgatcctgtcaattttgctgacgaggttgcccgagagcacgacctctcctaccagaaacagcttgaggcgggcgataacccttacctcaagtacaaccacgcggacgcagagtttcaggagaaactcgcttctgacacttcttttgggggaaaccttgggaaggctgttttccaggctaaaaagaggattctcgaacctcttggcctggttgagacgccggataaaacggcgcctgcggcaaaaaagaggcctctagagcagagtcctcaagagccagactcctcgagcggagttggcaagaaaggcaaacagcctgccagaaagagactcaactttgacgacgaacctggagccggagacgggcctcccccagaaggaccatcttccggagctatgtctactgagactgaaatgcgtgcagcagctggcggaaatggtggcgatgcgggacaaggtgccgagggagtgggtaatgcctccggtgattggcattgcgattccacttggtcagagagccacgtcaccaccacctcaacccgcacctgggtcctgccgacctacaacaaccacctgtacctgcggctcggctcgagcaacgccagcgacaccttcaacggattctccaccccctggggatactttgactttaaccgcttccactgccacttctcgccaagagactggcaaaggctcatcaacaaccactggggactgcgccccaaaagcatgcaagtccgcatcttcaacatccaagttaaggaggtcacgacgtctaacggggagacgaccgtatccaacaacctcaccagcacggtccagatctttgcggacagcacgtacgagctcccgtacgtgatggatgcaggtcaggagggcagcttgcctcctttccccaacgacgtgttcatggtgcctcagtacgggtactgcggactggtaaccggaggcagctctcaaaaccagacagacagaaatgccttctactgtctggagtactttcccagccagatgctgagaaccggaaacaactttgagatggtgtacaagtttgaaaacgtgcccttccactccatgtacgctcacagccagagcctggataggctgatgaacccgctgctggaccagtacctgtgggagctccagtctaccacctctggaggaactctcaaccagggcaattcagccaccaactttgccaagctgaccaaaacaaacttttctggctaccgcaaaaactggctcccggggcccatgatgaagcagcagagattctccaagactgccagtcaaaactacaagattccccagggaagaaacaacagtctgctccattatgagaccagaactaccctcgacggaagatggagcaattttgccccgggaacggccatggcaaccgcagccaacgacgccaccgacttctctcaggcccagctcatctttgcggggcccaacatcaccggcaacaccaccacagatgccaataacctgatgttcacttcagaagatgaacttagggccaccaacccccgggacactgacctgtttggccacctggcaaccaaccagcaaaacgccaccaccgttcctaccgtagacgacgtggacggagtcggcgtgtacccgggaatggtgtggcaggacagagacatttactaccaagggcccatttgggccaaaattccacacacggatggacactttcacccgtctcctctcattggcggatttggactgaaaagcccgcctccacaaatattcatcaaaaacactcctgtacccgccaatcccgcaacgaccttctctccggccagaatcaacagcttcatcacccagtacagcaccggacaggtggctgtcaaaatagaatgggaaatccagaaggagcggtccaagagatggaacccagaggtccagttcacgtccaactacggagcacaggactcgcttctctgggctcccgacaacgccggagcctacaaagagcccagggccattggatcccgatacctcaccaaccacctctag

SEQ ID NO: 5261 - DNA, 4694 bp, Bovine adeno-associated virus
  source 1..4694: mol_type = genomic DNA
gtggcactcccccccctgtcgcgttcgctcgttcgctggctcgattgggggggtggcagctcaaagagctgccagacgacggccctctgggccgtcgcccccccaatcgagccagcgaacgagcgaacgcgacaggggggggagtgccacactctctagcaagggggttttgtaggtggtgatgtcattgttgatgtcattatagttgtcacgcgatagttaatgattaacagtcatgtgatgtgtgttatccaataggatgaaagcgcgcgaatgagatctcgcgagacttccggggtataaaaggggtgagtgaacgagcccgccgccattctctgctctggactgctagaggaccctcgctgccatggctaccttctatgaagtcattgttcgcgttccatttgatgtggaagagcacctgcctggaatttctgacaactttgtagactgggtaactggtcaaatttgggagctgcctcccgagtcagatttgaatttgactctgattgagcagcctcagctgacggtggctgacagaattcgccgcgtgttcctgtacgagtggaacaaattttccaagcaggagagcaaattctttgtgcagtttgaaaagggatctgaatattttcatctgcacacgctcgtggagacctccggcatctcttctatggtccttggccgctacgtgagtcagattcgcgcccagctggtgaaggtggtgttccagaacattgagccgcggattaacgactgggtcgccatcaccaaggtaaagaagggcggagccaataaggtggtggattctgggtatattcccgcctacctgctgccgaaggtccaaccagagcttcagtgggcgtggactaacctcgaagagtataaattggccgccctcaatctggaggagcgcaaacggctcgtcgctcagtttcagcttgagtcctcgcagcgctcgcaagaggcatcttcccagagggacgtttcggctgacccggtcatcaagagcaagacttcccagaaatacatggcgctggtaagctggctggtggaacatggcatcacttccgagaagcagtggattcaggagaatcaggagagctacctgtccttcaactccacgggaaactctcggagccagattaaagccgcgcttgacaacgcgtcaaaaattatgagtctgaccaaatctgcctcagactatctcgtgggacagactgttccagaggacatttctgaaaacagaatctggcagatttttgatctcaacggctacgacccggcatacgcgggctctgttctctacggctggtgcactcgcgcctttggaaagaggaacaccgtctggctgtatggacccgcgaccaccggaaagaccaacatcgcggaagccatctctcacaccgtgcccttttatggctgtgtgaactggactaatgagaactttccctttaatgactgtgtggaaaaaatgttgatctggtgggaggagggaaagatgaccagcaaggtggtggaacccgccaaggccatcttgggggggtctagagtacgagtggatcaaaaatgtaaatcctctgtacaagtagactctaccccggtgattatcacctccaatactaacatgtgtgtggtggtggatgggaactccacgacctttgaacaccagcagccgctggaagaccgcatgttcagatttgaactcatgcggcggctcccgccagattttggcaagattaccaagcaggaagtcaaagacttttttgcttgggcaaaggtcaaccaggtgccggtgactcacgagtttatggttcccaagaaagtggcgggaactgagagggcggagacttctagaaaacgcccactggatgacgtcaccaataccaactataaaagtccggagaagcgggcccggctctcagttgttcctgagacgcctcgcagttcagacgtgcctgtagagcccgctcctctgcgacctctcaactggtcttccaggtatgaatgcagatgtgactatcatgctaaatttgactctgtaacgggggaatgtgacgagtgtgaatatttgaatcggggcaaaaatggctgtatctttcataatgctacacattgtcaaatttgtcacgctgttcctccatgggaaaaggaaaatgtgtcagattttaatgattttgatgactgtaataaagagcagtaaataaagtgagtagtcatgtcttttgttgaccaccctccagattggttggaatcgatcggcgacggctttcgtgaatttctcggccttgaggcgggtcccccgaaacccaaggccaatcaacagaagcaagataacgctcgaggtcttgtgcttcctgggtacaagtatcttggtcctgggaacggccttgataagggcgatcctgtcaattttgctgacgaggttgcccgagagcacgacctctcctaccagaaacagcttgaggcgggcgataacccttacctcaagtacaaccacgcggacgcagagtttcaggagaaactcgcttctgacacttcttttgggggaaaccttgggaaggctgttttccaggctaaaaagaggattctcgaacctcttggcctggttgagacgccggataaaacggcgcctgcggcaaaaaagaggcctctagagcagagtcctcaagagccagactcctcgagcggagttggcaagaaaggcaaacagcctgccagaaagagactcaactttgacgacgaacctggagccggagacgggcctcccccagaaggaccatcttccggagctatgtctactgagactgaaatgcgtgcagcagctggcggaaatggtggcgatgcgggacaaggtgccgagggagtgggtaatgcctccggtgattggcattgcgattccacttggtcagagagccacgtcaccaccacctcaacccgcacctgggtcctgccgacctacaacaaccacctgtacctgcggctcggctcgagcaacgccagcgacaccttcaacggattctccaccccctggggatactttgactttaaccgcttccactgccacttctcgccaagagactggcaaaggctcatcaacaaccactggggactgcgccccaaaagcatgcaagtccgcatcttcaacatccaagttaaggaggtcacgacgtctaacggggagacgaccgtatccaacaacctcaccagcacggtccagatctttgcggacagcacgtacgagctcccgtacgtgatggatgcaggtcaggagggcagcttgcctcctttccccaacgacgtgttcatggtgcctcagtacgggtactgcggactggtaaccggaggcagctctcaaaaccagacagacagaaatgccttctactgtctggagtactttcccagccagatgctgagaaccggaaacaactttgagatggtgtacaagtttgaaaacgtgcccttccactccatgtacgctcacagccagagcctggataggctgatgaacccgctgctggaccagtacctgtgggagctccagtctaccacctctggaggaactctcaaccagggcaattcagccaccaactttgccaagctgaccaaaacaaacttttctggctaccgcaaaaactggctcccggggcccatgatgaagcagcagagattctccaagactgccagtcaaaactacaagattccccagggaagaaacaacagtctgctccattatgagaccagaactaccctcgacggaagatggagcaattttgccccgggaacggccatggcaaccgcagccaacgacgccaccgacttctctcaggcccagctcatctttgcggggcccaacatcaccggcaacaccaccacagatgccaataacctgatgttcacttcagaagatgaacttagggccaccaacccccgggacactgacctgtttggccacctggcaaccaaccagcaaaacgccaccaccgttcctaccgtagacgacgtggacggagtcggcgtgtacccgggaatggtgtggcaggacagagacatttactaccaagggcccatttgggccaaaattccacacacggatggacactttcacccgtctcctctcattggcggatttggactgaaaagcccgcctccacaaatattcatcaaaaacactcctgtacccgccaatcccgcaacgaccttctctccggccagaatcaacagcttcatcacccagtacagcaccggacaggtggctgtcaaaatagaatgggaaatccagaaggagcggtccaagagatggaacccagaggtccagttcacgtccaactacggagcacaggactcgcttctctgggctcccgacaacgccggagcctacaaagagcccagggccattggatcccgatacctcaccaaccacctctagcccaattctgttgcataccctcaataaaccgtgtattcgtttcagtaaaatactgcctcttgtggtcattcggcgtacaacagcttacaacaacaacaaaacccccttgctagagagtgtggcactcccccccctgtcgcgttcgctcgttcgctggctcgattgggggggtggcagctcaaagagctgccagacgacggccctctgggccgtcgcccccccaatcgagccagcgaacgagcgaacgcgacaggggggggagtgccac

SEQ ID NO: 5262 - protein, 390 aa, Bovine adeno-associated virus
MALVSWLVEHGITSEKQWIQENQESYLSFNSTGNSRSQIKAALDNASKIMSLTKSASDYLVGQTVPEDISENRIWQIFDLNGYDPAYAGSVLYGWCTRAFGKRNTVWLYGPATTGKTNIAEAISHTVPFYGCVNWTNENFPFNDCVEKMLIWWEEGKMTSKVVEPAKAILGGSRVRVDQKCKSSVQVDSTPVIITSNTNMCVVVDGNSTTFEHQQPLEDRMFRFELMRRLPPDFGKITKQEVKDFFAWAKVNQVPVTHEFMVPKKVAGTERAETSRKRPLDDVTNTNYKSPEKRARLSVVPETPRSSDVPVEPAPLRPLNWSSRYECRCDYHAKFDSVTGECDECEYLNRGKNGCIFHNATHCQICHAVPPWEKENVSDFNDFDDCNKEQ

SEQ ID NO: 5263 - protein, 610 aa, Bovine adeno-associated virus
MATFYEVIVRVPFDVEEHLPGISDNFVDWVTGQIWELPPESDLNLTLIEQPQLTVADRIRRVFLYEWNKFSKQESKFFVQFEKGSEYFHLHTLVETSGISSMVLGRYVSQIRAQLVKVVFQNIEPRINDWVAITKVKKGGANKVVDSGYIPAYLLPKVQPELQWAWTNLEEYKLAALNLEERKRLVAQFQLESSQRSQEASSQRDVSADPVIKSKTSQKYMALVSWLVEHGITSEKQWIQENQESYLSFNSTGNSRSQIKAALDNASKIMSLTKSASDYLVGQTVPEDISENRIWQIFDLNGYDPAYAGSVLYGWCTRAFGKRNTVWLYGPATTGKTNIAEAISHTVPFYGCVNWTNENFPFNDCVEKMLIWWEEGKMTSKVVEPAKAILGGSRVRVDQKCKSSVQVDSTPVIITSNTNMCVVVDGNSTTFEHQQPLEDRMFRFELMRRLPPDFGKITKQEVKDFFAWAKVNQVPVTHEFMVPKKVAGTERAETSRKRPLDDVTNTNYKSPEKRARLSVVPETPRSSDVPVEPAPLRPLNWSSRYECRCDYHAKFDSVTGECDECEYLNRGKNGCIFHNATHCQICHAVPPWEKENVSDFNDFDDCNKEQ

SEQ ID NO: 5264 - protein, 736 aa, Bovine adeno-associated virus; identical to SEQ ID NO: 5248

SEQ ID NO: 5265 - protein, 600 aa, Bovine adeno-associated virus
TAPAAKKRPLEQSPQEPDSSSGVGKKGKQPARKRLNFDDEPGAGDGPPPEGPSSGAMSTETEMRAAAGGNGGDAGQGAEGVGNASGDWHCDSTWSESHVTTTSTRTWVLPTYNNHLYLRLGSSNASDTFNGFSTPWGYFDFNRFHCHFSPRDWQRLINNHWGLRPKSMQVRIFNIQVKEVTTSNGETTVSNNLTSTVQIFADSTYELPYVMDAGQEGSLPPFPNDVFMVPQYGYCGLVTGGSSQNQTDRNAFYCLEYFPSQMLRTGNNFEMVYKFENVPFHSMYAHSQSLDRLMNPLLDQYLWELQSTTSGGTLNQGNSATNFAKLTKTNFSGYRKNWLPGPMMKQQRFSKTASQNYKIPQGRNNSLLHYETRTTLDGRWSNFAPGTAMATAANDATDFSQAQLIFAGPNITGNTTTDANNLMFTSEDELRATNPRDTDLFGHLATNQQNATTVPTVDDVDGVGVYPGMVWQDRDIYYQGPIWAKIPHTDGHFHPSPLIGGFGLKSPPPQIFIKNTPVPANPATTFSPARINSFITQYSTGQVAVKIEWEIQKERSKRWNPEVQFTSNYGAQDSLLWAPDNAGAYKEPRAIGSRYLTNHL

(The sequence listing continues in the following parts.)
